(19) United States
(12) Patent Application Publication
(10) Pub. No.: US 2020/0048349 A1
(43) Pub. Date: Feb. 13, 2020

(54) ANTI-CD3 ANTIBODIES AND USES THEREOF

(71) Applicant: Janssen Biotech, Inc., Horsham, PA (US)

(72) Inventors: Francois GAUDET, Princeton, NJ (US); Jill GILES-KOMAR, Downingtown, PA (US); Bradley HEIDRICH, Gilbertsville, PA (US); Chichi HUANG, Malvern, PA (US); Colleen KANE, Flourtown, PA (US); Ronan MCDAID, Eagleville, PA (US); Jennifer NEMETH-SEAY, Fort Washington, PA (US)

(21) Appl. No.: 16/418,082

(22) Filed: May 21, 2019

Related U.S. Application Data
(60) Provisional application No. 62/676,081, filed on May 24, 2018.

(51) Int. Cl. C07K 16/28; A61K 39/395; C07K 16/30; A61P 35/00

(52) U.S. Cl. CPC C07K 16/2809; A61K 39/39541; C07K 16/3069; C07K 16/2803; A61P 35/00; A61K 2039/505; C07K 2317/92; C07K 2317/21; C07K 2317/24; C07K 2317/31; C07K 2317/55; C07K 16/28

(57) ABSTRACT

The present invention relates to antibodies that specifically bind CD3. The present invention relates to antibodies that specifically bind PSMA. The present invention relates to antibodies that specifically bind CD3 and PSMA. The present invention relates to antibodies that specifically bind IL1RAP. The present invention relates to antibodies that specifically bind CD33. The present invention relates to antibodies that specifically bind CD3 and IL1RAP. The present invention relates to antibodies that specifically bind CD3 and CD33. The present invention relates to antibodies that specifically bind TMEFF2. The present invention relates to antibodies that specifically bind CD3 and TMEFF2. The present invention relates to fragments of the antibodies, polynucleotides encoding the antibodies or fragments thereof, and methods of making and using the same.

### SEQUENCE LISTING

[0001] The instant application contains a Sequence Listing which has been submitted electronically in ASCII format and is hereby incorporated by reference in its entirety. Said ASCII copy, created on May 3, 2019, is named JBI5135USNP1_Sequence listing.txt and is 588 KB in size.

### TECHNICAL FIELD

[0002] The disclosure provided herein relates to anti-cluster of differentiation 3 (CD3)-antibodies, and antigen-binding fragments thereof, capable of specifically binding to human and non-human CD3, and in particular to anti-CD3 antibodies and antigen-binding fragments that are cross-reactive with CD3 of a non-human mammal (e.g., a cynomolgus monkey); prostate specific membrane antigen (PSMA)-antibodies, and antigen-binding fragments thereof, capable of specifically binding to human and non-human PSMA; IL1RAP antibodies, and antigen-binding fragments thereof, capable of specifically binding to human and non-human IL1RAP; CD33 antibodies, and antigen-binding fragments thereof, capable of specifically binding to human and non-human CD33; and bispecific antibodies that are capable of specifically binding CD3; PSMA; IL1RAP; CD33; CD3 and PSMA; CD3 and IL1RAP; or CD3 and CD33. The disclosure also pertains to uses of such antibodies and antigen-binding fragments in the treatment of cancer, autoimmune and/or inflammatory diseases and other conditions.

### BACKGROUND

[0003] Bispecific antibodies and antibody fragments have been explored as a means to recruit cytolytic T cells to kill tumor cells. However, the clinical use of many T cell-recruiting bispecific antibodies has been limited by challenges including unfavorable pharmacokinetics, potential immunogenicity, and manufacturing issues. There thus exists a considerable need for bispecific antibodies that recruit cytolytic T cells to kill tumor cells that exhibit reduced toxicity and favorable manufacturing profiles.

[0004] The human CD3 T cell antigen receptor protein complex is composed of six distinct chains: a CD3γ chain (SwissProt P09693), a CD36 chain (SwissProt P04234), two CD3ε chains (SwissProt P07766), and one CD3ζ chain homodimer (SwissProt P20963) (εγ:εδ:ζζ), which is associated with the T cell receptor α and β chain. This complex plays an important role in coupling antigen recognition to several intracellular signal-transduction pathways. The CD3 complex mediates signal transduction, resulting in T cell activation and proliferation. CD3 is required for immune response.

### SUMMARY

[0005] Provided herein are isolated recombinant anti-CD3 antibodies, or antigen-binding fragments thereof, comprising: a heavy chain comprising a heavy chain complementarity determining region (HCDR) 1 comprising SEQ ID NO: 662; a HCDR2 comprising SEQ ID NO: 663; and a HCDR3 comprising SEQ ID NO: 664 and a light chain comprising a light chain complementarity determining region (LCDR) 1 comprising SEQ ID NO: 671, a LCDR2 comprising SEQ ID NO: 673, and a LCDR3 comprising SEQ ID NO: 690; a heavy chain variable region comprising SEQ ID NO: 652 and a light chain variable region comprising SEQ ID NO: 661; a heavy chain comprising SEQ ID NO: 640 and a light chain comprising SEQ ID NO: 676; or comprising: a heavy chain comprising a HCDR1 comprising SEQ ID NO: 662; a HCDR2 comprising SEQ ID NO: 663; and a HCDR3 comprising SEQ ID NO: 664 and a light chain comprising a LCDR1 comprising SEQ ID NO: 773, a LCDR2 comprising SEQ ID NO: 673, and a LCDR3 comprising SEQ ID NO: 690; a heavy chain variable region comprising SEQ ID NO: 657 and a light chain variable region comprising SEQ ID NO: 678; or a heavy chain comprising SEQ ID NO: 675 and a light chain comprising SEQ ID NO: 678.

[0006] Also provided are isolated recombinant anti-CD3 antibodies or antigen-binding fragments thereof, that specifically bind Macaca fascicularis or human CD3d, or CD3e, or CD3e and CD3d with a binding affinity of about 300 nM or less.

[0007] In some embodiments, the isolated recombinant anti-CD3 antibodies or antigen-binding fragments thereof have one, two, three, or four, of the following properties:
[0008] bind human and Macaca fascicularis CD3+ T lymphocytes with a calculated EC50 of 20 nM or less and bind Macaca fascicularis CD3-expressing HEK cells with a calculated EC50 of 40 nM or less, wherein the difference in calculated EC50 between binding CD3+ T lymphocytes and binding Macaca fascicularis CD3-expressing HEK cells is less than 5-fold, and wherein the calculated EC50 is measured in a whole cell binding assay at 0° C. using flow cytometry;
[0009] bind recombinant CD3d from human (SEQ ID NO:691), or bind recombinant CD3e from human (SEQ ID NO:636), or recombinant CD3d from Macaca fascicularis (SEQ ID NO:692), with an equilibrium dissociation constant (KD) of 12 nM or less, wherein the KD is measured using Proteon surface plasmon resonance assay ProteOn XPR36 system at +25° C.;
[0010] bind residues 1-6 of CD3e as determined by X-ray crystallography; or
[0011] activate T cells or induces CD69 expression to a similar degree as cOKT3 or SP34-2 as determined by fluorescence-activated cell sorting assay.

[0012] In some embodiments, the antibodies or antigen-binding fragments thereof described herein comprise the HCDR1, the HCDR2, the HCDR3, the LCDR1, the LCDR2, and the LCDR3 of SEQ ID NOs:662, 663, 664, 671, 673, and 690, respectively; a VH and a VL of SEQ ID NOs:652 and 661, respectively; or a HC and a LC of SEQ ID NOs:640 and 676, respectively.

[0013] In some embodiments, the antibodes or antigen-binding fragments thereof described herein comprise the HCDR1, the HCDR2, the HCDR3, the LCDR1, the LCDR2, and the LCDR3 of SEQ ID NOs:662, 663, 664, 773, 673, and 690, respectively; a VH and a VL of SEQ ID NOs:657 and 678, respectively or a HC and a LC of SEQ ID NOs:675 and 677, respectively.

[0014] Further described herein are bispecific antibodies comprising a first domain that specifically binds CD3 and a second domain that specifically binds a second antigen, wherein the first domain comprises an antibody or antigen-binding fragment thereof described herein.

[0015] The bispecific antibodies described herein can comprise a first domain that comprises the HCDR1, HCDR2, the HCDR3, the LCDR1, the LCDR2, and the LCDR3 of SEQ ID NOs:662, 663, 664, 671, 673, and 670, respectively; and a second domain that comprises the HCDR1, HCDR2, the HCDR3, the LCDR1, the LCDR2, and the LCDR3 of SEQ ID NOs:697, 683, 698, 699, 792, and 686, respectively;

[0016] The bispecific antibodies described herein can comprise a first domain that comprises the VH and VL of SEQ ID NOs:652 and 661, respectively; and a second domain that comprises the VH and VL of SEQ ID NOs:681 and 682, respectively.

[0017] The bispecific antibodies described herein can comprise a first domain that comprises the HC and LC of SEQ ID NOs:640 and 676, respectively; and a second domain that comprises the HC and LC of SEQ ID NOs:679 and 680, respectively.

[0018] The bispecific antibodies described herein can comprise a first domain that comprises the HCDR1, HCDR2, the HCDR3, the LCDR1, the LCDR2, and the LCDR3 of SEQ ID NOs:662, 663, 664, 671, 673, and 670, respectively; and a second domain that comprises the HCDR1, HCDR2, the HCDR3, the LCDR1, the LCDR2, and the LCDR3 of SEQ ID NOs:704, 705, 706, 707, 708, and 709, respectively.

[0019] The bispecific antibodies described herein can comprise a first domain that comprises the VH and VL of SEQ ID NOs:652 and 661, respectively; and a second domain that comprises the VH and VL of SEQ ID NOs:702 and 703, respectively.

[0020] The bispecific antibodies described herein can comprise a first domain that comprises the HC and LC of SEQ ID NOs:640 and 676, respectively; and a second domain that comprises the HC and LC of SEQ ID NOs:700 and 701, respectively.

[0021] The disclosure further provides isolated bispecific CD3×PSMA antibodies comprising a first domain that binds to cells expressing recombinant Macaca fascicularis or human CD3d or CD3e with an affinity of 300 nM or less, wherein the binding to cells is measured by flow cytometry, and a second domain that specifically bind PSMA.

[0022] In some embodiments, the bispecific CD3×PSMA antibody comprises a first domain that:
[0023] binds human and Macaca fascicularis CD3+ T lymphocytes with a calculated EC50 of 20 nM or less and binds Macaca fascicularis CD3-expressing HEK cells with a calculated EC50 of 40 nM or less, wherein the difference in calculated EC50 between binding CD3+ T lymphocytes and binding Macaca fascicularis CD3-expressing HEK cells is less than 5-fold, and wherein the calculated EC50 is measured in a whole cell binding assay at 0° C. using flow cytometry;
[0024] binds recombinant CD3d from human (SEQ ID NO:691), or binds recombinant CD3e from human (SEQ ID NO:636), or binds recombinant CD3d from Macaca fascicularis (SEQ ID NO:692), or binds recombinant CD3e from Macaca fascicularis (SEQ ID NO:693) with an equilibrium dissociation constant (KD) of 12 nM or less, wherein the KD is measured using Proteon surface plasmon resonance assay ProteOn XPR36 system at +25° C.;
[0025] displays no methionine or tryptophan oxidation, or displays no asparagine deamidation, or displays no asparagine isomerization as detected by peptide mapping analysis;
[0026] binds residues 1-6 of CD3e as determined by X-ray crystallography; or
[0027] activates T cells or induces CD69 expression to a similar degree as cOKT3 or SP34-2 as determined by fluorescence-activated cell sorting assay.

[0028] Also described are pharmaceutical compositions comprising the antibodies described herein and a pharmaceutically acceptable carrier.

[0029] The disclosure further provides methods of producing the antibodies described herein, comprising culturing a host cell comprising a vector comprising a polynuceotide encoding the antibodies or antigen-binding fragments thereof described herein in conditions that the antibody is expressed, and recovering the antibody produced by the host cell. The methods of producing the bispecific CD3×PSMA antibody can comprise combining a monospecific bivalent CD3 antibody having two identical HC1 and two identical LC1 and a monospecific bivalent PSMA antibody having two identical HC2 and two identical LC2 in a mixture of about 1:1 molar ratio; introducing a reducing agent into the mixture; incubating the mixture about ninety minutes to about six hours; removing the reducing agent; and purifying the bispecific CD3×PSMA antibody that comprises the HC1, the LC1, the HC2 and the LC2.

[0030] Further described are methods of treating a cancer in a subject, comprising administering a therapeutically effective amount of the isolated antibodies described to the subject in need thereof for a time sufficient to treat the cancer.

[0031] The disclosure also provides kits comprising the antibodies described herein. The kits can further comprise reagents for detecting the antibodies and instructions of use.

### BRIEF DESCRIPTIONS OF THE DRAWINGS

[0032] The summary, as well as the following detailed description, is further understood when read in conjunction with the appended drawings. For the purpose of illustrating the disclosed antibodies and methods, there are shown in the drawings exemplary embodiments of the antibodies and methods; however, antibodies and methods are not limited to the specific embodiments disclosed. In the drawings:

[0033] FIGS. 1A and 1B show anti-CD3 antibodies produced in OmniRat. VH (FIG. 1A) and VL (FIG. 1B) sequences of active anti-CD3 mAbs produced in OmniRat were aligned with human germline sequences from IMGT. CDR regions are underlined. Sequence divergence is shown in bold. FIG. 1A discloses SEQ ID NOS 651, 651, 653, 656, 655, 20, 654 and 717 and FIG. 1B discloses SEQ ID NOS 658, 688, 660, 659, 659, 659, 659 and 718, all respectively, in order of appearance.

[0034] FIG. 2 shows a cell-based binding assay to assess the binding capacity of individual rat hybridoma supernatants to human purified CD3+ T lymphocytes.

[0035] FIG. 3 shows a cell-based binding assay to assess the binding capacity of individual rat hybridoma supernatants to cynomolgus purified CD3+ T lymphocytes.

[0036] FIG. 4 shows competition assay results of hybridoma supernatants assessed for their ability to compete with commercial anti-human CD3 antibody SP34-2, which has a known epitope and is cross-reactive with cynomolgus CD3.

[0037] FIG. 5 shows representative binding curves of anti-CD3 antibodies on primary human T cells.

[0038] FIG. 6 shows representative competition binding curves of anti-CD3 antibodies with AlexaFluor 488 conjugated SP34-2 on primary human T cells.

[0039] FIG. 7 shows binding of light chain (LC) engineered BLW-2E6 mAbs to primary human T cells.

[0040] FIG. 8 shows binding of heavy chain (HC) engineered BLW-2E6 to primary human T cells.

[0041] FIG. 9 shows AlexaFluor™ (AF) 488 CD3 Saturation in Human T Cells by FACS analysis. Acquired mean fluorescence intensity values were plotted as a function of the antibody molecule concentration. Kd values were derived for each donor, and the mean value obtained. The Saturation Binding Constant (KdT) for human T-Cells was derived to be 5.6±1.0 nM (n=4) and was used herein to determine Kd binding affinities. One human donor was excluded as it failed the viability criteria of being at least 60% during analysis. “LS” identifiers in figure legend refer to individual human T cell donors.

[0042] FIG. 10 shows inhibition curves for the bivalent anti CD3 antibodies, CD3B376 and CD3B450, for competing for binding against the AlexaFluor488 SP-34 anti CD3 antibody. IC50 values were derived to be 29 and 60 nM respectively.

[0043] FIG. 11 shows sensorgrams of BLW-2E6 variants binding to hCD3ε(1-27)-Tn25.

[0044] FIGS. 12A-12E shows thermal stability of anti-CD3 antibodies CD3B376 (FIG. 12A), CD3B450 (FIG. 12B), CD3B389 (FIG. 12C), CD3B467 by DSC (FIG. 12D), and overlay of the thermograms for all the candidates (FIG. 12E).

[0045] FIGS. 13A-13B show comparisons of the thermal stability of anti-CD3 antibodies overlay of thermograms for CD3B376 and CD3B389 (FIG. 13A); overlay of thermograms for CD3B450 and CD3B467 (FIG. 13B).

[0046] FIG. 14 shows LNCAP cell binding of a subset of affinity-matured PSMA×CD3 bispecific antibodies.

[0047] FIG. 15 shows LNCAP cell binding of a subset of affinity-matured PSMA×CD3 bispecific antibodies.

[0048] FIG. 16 shows PSMA-negative PC3 cell binding results of affinity-matured PSMA×CD3 bispecific antibodies.

[0049] FIG. 17 shows results of PSMA×CD3 Affinity Matured Bispecific Abs in a Functional Cell Killing Assay.

[0050] FIG. 18 shows antibody-antigen interactions in the CD3B334:CD3 complex. CD3 residues are in ellipses, CD3B334 residues are in boxes.

[0051] FIG. 19 shows a primary human and cynomolgus monkey T cell based assay used to determine the capacity of the hybridoma hits to activate T cells as measured by CD69 activation.

[0052] FIG. 20 shows anti-tumor efficacy of PS3B79 in LnCAP AR.TB human prostate xenografts in T cell humanized NSG mice. Subcutaneous LnCAP AR.TB tumors were measured twice weekly and the results presented as the mean tumor volume, expressed in mm³±SEM (*, p<0.0001).

[0053] FIG. 21 shows anti-tumor efficacy of PS3B90 in LnCAP AR.TB human prostate xenografts in T cell humanized NSG mice. Subcutaneous LnCAP AR.TB tumors were measured twice weekly and the results presented as the mean tumor volume, expressed in mm³±SEM (*, p<0.001).

[0054] FIGS. 22A-22D show titration curves for Anti-PSMA phage panning hits binding to human LNCaP cells. FIG. 22A shows titration curves for hits G9-PSM M18, M25, M50, M52, M56, M57, and M59; FIG. 22B shows M52 and M110; FIG. 22C shows M85, M87, and M81; and FIG. 22D shows M52 and M84. In FIG. 22D, Mammalian-expressed supernatants were normalized for Fab expression via octet, and titrated against either human LNCAP, PSMG5 (Cyno-PSMA HEK), or PSMG9 (chimp-PSMA HEK) cells using flowcytometry. Geometric mean fluorescence intensity (GeoMFI) was ploted vs. Fab concertation using GraphPad Prizm.

[0055] FIGS. 23A-23D show titration curves for Anti-PSMA phage panning hits binding to Chimpanzee-PSMA expressing HEK cells shows. (Mammalian Fab Supernatant Titration Curves for Anti-PSMA Phage Panning Hits vs Chimp-PSMA HEK). FIG. 23A shows titration curves for hits G9-PSM M18, M25, M50, M52, M56, M57, and M59; FIG. 23B shows M52 and M110; FIG. 23C shows M81, M52, M85, and M87; and FIG. 23D shows M52 and M84. In FIG. 23D, Mammalian-expressed supernatants were normalized for Fab expression via octet, and titrated against either human LNCAP, PSMG5 (Cyno-PSMA HEK), or PSMG9 (chimp-PSMA HEK) cells using flowcytometry. Geometric mean fluorescence intensity (GeoMFI) was ploted vs. Fab concertation using GraphPad Prizm.

[0056] FIGS. 24A-24D show titration curves for Anti-PSMA phage panning hits binding to Cynomolgus monkey PSMA-expressing HEK cells. (Mammalian Fab Supernatant Titration Curves for Anti-PSMA Phage Panning Hits vs Cyno PSMA HEK). FIG. 24A shows titration curves for hits G9-PSM M18, M25, M50, M52, M56, M57, and M59; FIG. 24B shows M52 and M110; FIG. 24C shows M81, M52, M85, and M87; and FIG. 24D shows M52 and M84. In FIG. 24D, Mammalian-expressed supernatants were normalized for Fab expression via octet, and titrated against either human LNCAP, PSMG5 (Cyno-PSMA HEK), or PSMG9 (chimp-PSMA HEK) cells using flow cytometry. Geometric mean fluorescence intensity (GeoMFI) was ploted vs. Fab concertation using GraphPad Prizm.

[0057] FIG. 25 shows the overall structure of PSMM84 Fab bound to human PSMA ECD homodimer.

[0058] FIG. 26 shows a close view of PSMA main interactions with the PSMB83 Light Chain.

[0059] FIG. 27 shows a close view of PSMA main interactions with the PSMB83 Heavy Chain FIG. 28 shows the comparison of epitope residues of PSMB83 within the sequences of human (SEQ ID NO: 719), mouse (SEQ ID NO: 720) and cynomolgus monkey (cyno) (SEQ ID NO: 721) PSMA. Epitope residues are shaded and sequence divergence is shown by underline.

[0060] FIG. 29 shows the paratope residues of PSMB83. CDRs are underlined and paratope residues are shaded. FIG. 30 discloses SEQ ID NOS 722-727, respectively, in order of appearance.

[0061] FIG. 30 shows an interaction map with direct contacts made between PSMA and PSMM84. Van der Waals interactions are shown as dashed lines and H-bonds are solid lines with arrows pointing to the backbone atoms.

[0062] FIG. 31 shows expression levels of anti-PSMA Fab clones derived from PSMM84 as compared to expression of parent PSMB83. Raw luminescence numbers were plotted against the log concentration FIG. 32 shows binding to human PSMA of anti-PSMA Fab clones derived from PSMB83 as compared to binding of parent PSMM84. Raw luminescence numbers were plotted against the log concentration.

[0063] FIG. 33 shows binding to cyno PSMA of anti-PSMA Fab clones derived from PSMB83 as compared to binding of parent PSMB83. Raw luminescence numbers were plotted against the log concentration.

[0064] FIG. 34 shows IC3B19 and IC3B34 Ex Vivo Mediated T cell Cytotoxicity of LAMA-84 cells in Whole Blood after 48 hours. The concentration of IC3B19 and IC3B34 is provided in the table in the lower part of the figure.

[0065] FIG. 35 shows IC3B19 and IC3B34 Ex Vivo Mediated T-cell Activation in Whole Blood after 48 hours. The concentration of IC3B19 and IC3B34 is provided in the table in the lower part of the figure.

[0066] FIGS. 36A-55B (descriptions below) show IC3B19 and IC3B34 mediated engagement of T cells and IL1RAP+ target cell line LAMA-84 (endogenous and exogenously added tumor cells). Supernatants were evaluated for 10 pro-inflammatory cytokines from whole blood (n=15 donors) cytotoxicity and T-cell activation assays with exogenous LAMA-84 IL1RAP+ tumor cell line added. For these figures, statistically significant differences are shown in bold text.

[0067] FIGS. 36A-36B show T cell IL-1beta release mediated by IC3B19 and IC3B34 (FIG. 36A) and corresponding 4PL regression parameter estimates (FIG. 36B) after 24 hours.

[0068] FIGS. 37A-37B show T cell IL-1beta release mediated by IC3B19 and IC3B34 (FIG. 37A) and corresponding 4PL regression parameter estimates (FIG. 37B) after 48 hours.

[0069] FIGS. 38A-38B show T cell IL-2 release mediated by IC3B19 and IC3B34 (FIG. 38A) and corresponding 4PL regression parameter estimates (FIG. 38B) after 24 hours.

[0070] FIGS. 39A-39B show T cell IL-2 release mediated by IC3B19 and IC3B34 (FIG. 39A) and corresponding 4PL regression parameter estimates (FIG. 39B) after 48 hours.

[0071] FIGS. 40A-40B show T cell IL-4 release mediated by IC3B19 and IC3B34 (FIG. 40A) and corresponding 4PL regression parameter estimates (FIG. 40B) after 24 hours.

[0072] FIG. 41 shows T cell IL-4 release mediated by IC3B19 and IC3B34 after 48 hours.

[0073] FIGS. 42A-42B show T cell IL-6 release mediated by IC3B19 and IC3B34 (FIG. 42A) and corresponding 4PL regression parameter estimates (FIG. 42B) after 24 hours.

[0074] FIG. 43 shows T cell IL-6 release mediated by IC3B19 and IC3B34 after 48 hours.

[0075] FIG. 44 shows T cell IL-8 release mediated by IC3B19 and IC3B34 after 24 hours.

[0076] FIG. 45 shows T cell IL-8 release mediated by IC3B19 and IC3B34 after 48 hours.

[0077] FIGS. 46A-46B show T cell IL-10 release mediated by IC3B19 and IC3B34 (FIG. 46A) and corresponding 4PL regression parameter estimates (FIG. 46B) after 24 hours.

[0078] FIGS. 47A-47B show T cell IL-10 release mediated by IC3B19 and IC3B34 (FIG. 47A) and corresponding 4PL regression parameter estimates (FIG. 47B) after 48 hours.

[0079] FIG. 48 shows T cell IL-12p70 release mediated by IC3B19 and IC3B34 after 24 hours.

[0080] FIG. 49 shows T cell IL-12p70 release mediated by IC3B19 and IC3B34 after 48 hours.

[0081] FIG. 50 shows T cell IL-13 release mediated by IC3B19 and IC3B34 after 24 hours.

[0082] FIGS. 51A-51B show T cell IL-13 release mediated by IC3B19 and IC3B34 (FIG. 51A) and corresponding 4PL regression parameter estimates (FIG. 51B) after 48 hours.

[0083] FIGS. 52A-52B show T cell IFN-gamma release mediated by IC3B19 and IC3B34 (FIG. 52A) and corresponding 4PL regression parameter estimates (FIG. 52B) after 24 hours.

[0084] FIGS. 53A-53B show T cell IFN-gamma release mediated by IC3B19 and IC3B34 (FIG. 53A) and corresponding 4PL regression parameter estimates (FIG. 53B) after 48 hours.

[0085] FIGS. 54A-54B show T cell TNF-alpha release mediated by IC3B19 and IC3B34 (FIG. 54A) and corresponding 4PL regression parameter estimates (FIG. 54B) after 24 hours.

[0086] FIGS. 55A-55B show T cell TNF-alpha release mediated by IC3B19 and IC3B34 (FIG. 55A) and corresponding 4PL regression parameter estimates (FIG. 55B) after 48 hours.

[0087] FIG. 56 shows IC3B19 and IC3B34, but not the bispecific antibodies with null arms (IAPB57×B23B49 or B23B39×CD3B219), induced target specific cytotoxicity in NCI-H1975 cells. In this assay, the cytotoxicity EC50s vary three-fold between IC3B19 and IC3B34, with values of 0.018 and 0.057 nM, respectively.

[0088] FIG. 57 shows Anti-Tumor Efficacy of IAPB57×CD3B376 in H1975 Human NSCLC Xenografts in T cell Humanized NSG Mice. Subcutaneous H1975 tumors were measured twice weekly and the results presented as the average tumor volume, expressed in mm3±SEM, *p<0.0001.

[0089] FIG. 58 shows a comparison of isoelectric points for various anti-PSMA constructs.

[0090] FIG. 59 plots change in wavelength compared to CNTO5825 control molecule. Control CNTO607 shows characteristically strong self-interaction. Error bars represent standard deviations from triplicate measurements.

[0091] FIG. 60 shows a comparison of retention times on IgG and control columns in an anti-PSMA cross-interaction assay.

[0092] FIGS. 61A-61B show ex vivo assessment of CD33×CD3 bispecific antibodies using anti-CD3 arm CD3B219 and CD3B376 cytotoxicity of blasts and T cell activation in fresh AML patient whole blood. FIG. 61A shows the percent of total cell cytotoxicity of AML cells using CD33 bispecific antibodies or the CD3×null controls. FIG. 61B shows T cell activation induced by CD33 bispecific antibodies or the CD3×null controls. No Fc blocker was added.

[0093] FIGS. 62A-62C show CD33×CD3 T-cell mediated cytotoxicity assays. CD33×CD3 bispecific antibodies using anti-CD3 arm CD3B219 and anti-CD3B376 were incubated with human pan T cells and AML cell lines that are either wildtype (KG1, FIG. 62A), heterozygous (SH2, FIG. 62B) or homozygous (OCIAML3, FIG. 62C) for the CD33 SNP rs12459419 mutation. After 48 hr at 37° C., 5% CO2, total tumor cell cytotoxicity was measured by flow cytometry.

[0094] FIGS. 63A-63B show ex vivo assessment of C33B904 antibodies paired with either CD3B219 or CD3B376 on the cytotoxicity of MOLM-13 cells exogenously added to normal healthy human whole blood (N=6 donors): Percent of cytotoxicity of MOLM-13 cells (FIG. 63A) and CD33⁺CD14⁺ monocytes (FIG. 63B) using CD33×CD3 bispecifics and respective null×CD3 controls at 48 hrs.

[0095] FIGS. 64A-64B show ex vivo assessment of CD33×CD3 bispecific antibodies using anti-CD3 arm CD3B219 and CD3B376 on the cytotoxicity of monocytes and T cell activation in fresh whole blood from six normal cynomologous monkey donors. FIG. 64A shows the percent of total cell cytotoxicity of CD33⁺CD14⁺ cyno monocytes using CD33 bispecific antibodies or their CD3×null controls. FIG. 64B shows T cell activation induced by CD33 bispecific antibodies or their CD3×null controls. No Fc blocker was added.

[0096] FIG. 65 shows anti-tumor efficacy of C3CB189 in MOLM-13 human AML xenografts in T cell humanized NSG mice. Disseminated MOLM-13 tumors were imaged for bioluminescence (BLI) twice weekly and the results presented as average radiance (p/s/cm²/sr)±SEM (n=8-10/group). *p≤0.0001 for treatment vs. control, calculated by two-way ANOVA with Bonferroni test.

[0097] FIG. 66 shows survival of animals treated with C3CB189 in MOLM-13 Human AML xenografts in T cell humanized NSG mice. Survival of MOLM-13 bearing mice is graphically represented using a Kaplan-Meier curve and evaluated by Log-rank (Mantel-Cox) test. *p<0.0001 for treatment vs. control groups.

[0098] FIG. 67 shows anti-tumor efficacy of C3CB88 in MOLM-13 human AML xenografts in T cell humanized NSG mice. Disseminated MOLM-13 tumors were imaged for bioluminescence (BLI) twice weekly and the results presented as average radiance (p/s/cm²/sr)±SEM (n=8-10/group). *p≤0.0001 for treatment vs. control, calculated by two-way ANOVA with Bonferroni test.

[0099] FIG. 68 shows survival of animals treated with C3CB88 in MOLM-13 human AML xenografts in T cell humanized NSG mice. Survival of MOLM-13 bearing mice is graphically represented using a Kaplan-Meier curve and evaluated by Log-rank (Mantel-Cox) test. *p≤0.05 for treatment vs. control groups.

[0100] FIG. 69 shows the alignment of select anti-TMEFF2 antibody heavy chain variable regions (VH). The VH regions are identified by their SEQ ID NO: at the beginning of each row.

[0101] FIG. 70 shows the alignment of select anti-TMEFF2 antibody light chain variable regions (VL). The VH regions are identified by their SEQ ID NO: at the beginning of each row.

[0102] FIG. 71 shows the reduction in mean tumor volume of each mouse treated with 0.5 mg/kg TMCB132 in an ex vivo LnCaP prostate cancer model in male NGS mice.

[0103] FIG. 72 shows efficacy of TMEB762×CD3B376 in established LNCaP Xenografts in T Cell Humanized NSG Mice.

[0104] FIG. 73 shows T-cell activation in LnCaP prostate cancer cells in response to administration of TMCB132.

[0105] FIG. 74 shows T cell-mediated cytotoxicity of TMCB132.

[0106] FIG. 75 shows the antitumor efficacity of TMCB132 in T-cell humanized mice.

### DETAILED DESCRIPTION OF THE INVENTION

[0107] All publications, including but not limited to patents and patent applications, cited in this specification are herein incorporated by reference as though fully set forth.

[0108] It is to be understood that the terminology used herein is for the purpose of describing particular embodiments only and is not intended to be limiting. Unless defined otherwise, all technical and scientific terms used herein have the same meaning as commonly understood by one of ordinary skill in the art to which the invention pertains.

[0109] Although any methods and materials similar or equivalent to those described herein may be used in the practice for testing of the present invention, exemplary materials and methods are described herein. In describing and claiming the present invention, the following terminology will be used.

[0110] As used in this specification and the appended claims, the singular forms “a,” “an,” and “the” include plural referents unless the content clearly dictates otherwise. Thus, for example, reference to “a cell” includes a combination of two or more cells, and the like.

[0111] “Specific binding” or “specifically binds” or “binds” refers to an antibody binding to an antigen or an epitope within the antigen with greater affinity than for other antigens. Typically, the antibody binds to the antigen or the epitope within the antigen with an equilibrium dissociation constant (K_{D}) of about 5×10⁻⁸ M or less, for example about 1×10⁻⁹ M or less, about 1×10⁻¹⁰ M or less, about 1×10⁻¹¹ M or less, or about 1×10⁻¹² M or less, typically with the K_{D} that is at least one hundred-fold less than its K_{D} for binding to a non-specific antigen (e.g., BSA, casein). The dissociation constant may be measured using standard procedures. Antibodies that specifically bind to the antigen or the epitope within the antigen may, however, have cross-reactivity to other related antigens, for example to the same antigen from other species (homologs), such as human or monkey, for example Macaca fascicularis (cynomolgus, cyno) or Pan troglodytes (chimpanzee, chimp). While a monospecific antibody specifically binds one antigen or one epitope, a bispecific antibody specifically binds two distinct antigens or two distinct epitopes.

[0112] “Antibodies” is meant in a broad sense and includes immunoglobulin molecules including monoclonal antibodies including murine, human, humanized and chimeric monoclonal antibodies, antigen binding fragments, bispecific or multispecific antibodies, dimeric, tetrameric or multimeric antibodies, single chain antibodies, domain antibodies and any other modified configuration of the immunoglobulin molecule that comprises an antigen binding site of the required specificity. “Full length antibody molecules” are comprised of two heavy chains (HC) and two light chains (LC) inter-connected by disulfide bonds as well as multimers thereof (e.g. IgM). Each heavy chain is comprised of a heavy chain variable region (VH) and a heavy chain constant region (comprised of domains CH1, hinge, CH2 and CH3). Each light chain is comprised of a light chain variable region (VL) and a light chain constant region (CL). The VH and the VL regions may be further subdivided into regions of hypervariability, termed complementarity determining regions (CDR), interspersed with framework regions (FR). Each VH and VL is composed of three CDRs and four FR segments, arranged from amino-to-carboxy-terminus in the following order: FR1, CDR1, FR2, CDR2, FR3, CDR3 and FR4.

[0113] “Complementarity determining regions (CDR)” are antibody regions that bind an antigen. CDRs may be defined using various delineations such as Kabat (Wu et al. (1970) J Exp Med 132: 211-50) (Kabat et al., Sequences of Proteins of Immunological Interest, 5th Ed. Public Health Service, National Institutes of Health, Bethesda, Md., 1991), Chothia (Chothia et al. (1987) J Mol Biol 196: 901-17), IMGT (Lefranc et al. (2003) Dev Comp Immunol 27: 55-77) and AbM (Martin and Thornton (1996) J Bmol Biol 263: 800-15). The correspondence between the various delineations and variable region numbering are described (see e.g. Lefranc et al. (2003) Dev Comp Immunol 27: 55-77; Honegger and Pluckthun, (2001) J Mol Biol 309:657-70; International ImMunoGeneTics (IMGT) database; Web resources, http://www_imgt_org). Available programs such as abYsis by UCL Business PLC may be used to delineate CDRs. The term “CDR”, “HCDR1”, “HCDR2”, “HCDR3”, “LCDR1”, “LCDR2” and “LCDR3” as used herein includes CDRs defined by any of the methods described supra, Kabat, Chothia, IMGT or AbM, unless otherwise explicitly stated in the specification.

[0114] Immunoglobulins may be assigned to five major classes, IgA, IgD, IgE, IgG and IgM, depending on the heavy chain constant domain amino acid sequence. IgA and IgG are further sub-classified as the isotypes IgA1, IgA2, IgG1, IgG2, IgG3 and IgG4. Antibody light chains of any vertebrate species may be assigned to one of two clearly distinct types, namely kappa (κ) and lambda (λ), based on the amino acid sequences of their constant domains.

[0115] “Antigen binding fragment” refers to a portion of an immunoglobulin molecule that binds an antigen. Antigen binding fragments may be synthetic, enzymatically obtainable or genetically engineered polypeptides and include the VH, the VL, the VH and the VL, Fab, F(ab′)2, Fd and Fv fragments, domain antibodies (dAb) consisting of one VH domain or one VL domain, shark variable IgNAR domains, camelized VH domains, minimal recognition units consisting of the amino acid residues that mimic the CDRs of an antibody, such as FR3-CDR3-FR4 portions, the HCDR1, the HCDR2 and/or the HCDR3 and the LCDR1, the LCDR2 and/or the LCDR3. VH and VL domains may be linked together via a synthetic linker to form various types of single chain antibody designs where the VH/VL domains may pair intramolecularly, or intermolecularly in those cases when the VH and VL domains are expressed by separate single chain antibody constructs, to form a monovalent antigen binding site, such as single chain Fv (scFv) or diabody; described for example in Int. Patent Publ. Nos. WO1998/44001, WO1988/01649, WO1994/13804 and WO1992/01047.

[0116] “Monoclonal antibody” refers to an antibody obtained from a substantially homogenous population of antibody molecules, i.e., the individual antibodies comprising the population are identical except for possible well-known alterations such as removal of C-terminal lysine from the antibody heavy chain or post-translational modifications such as amino acid isomerization or deamidation, methionine oxidation or asparagine or glutamine deamidation. Monoclonal antibodies typically bind one antigenic epitope. A bispecific monoclonal antibody binds two distinct antigenic epitopes. Monoclonal antibodies may have heterogeneous glycosylation within the antibody population. Monoclonal antibody may be monospecific or multispecific such as bispecific, monovalent, bivalent or multivalent.

[0117] “Isolated antibody” refers to an antibody or antibody fragment that is substantially free of other antibodies having different antigenic specificities (e.g., an isolated antibody specifically binding an antigen is substantially free of antibodies that specifically bind antigens other than the antigen). In the case of bispecific CD3 antibodies, the bispecific antibody specifically binds both CD3 a second antigen. “Isolated antibody” encompasses antibodies that are isolated to a higher purity, such as antibodies that are 80%, 81%, 82%, 83%, 84%, 85%, 86%, 87%, 88%, 89%, 90%, 91%, 92%, 93%, 94%, 95%, 96%, 97%, 98%, 99% or 100% pure.

[0118] “Humanized antibody” refers to an antibody in which at least one CDR is derived from non-human species and at least one framework is derived from human immunoglobulin sequences. Humanized antibody may include substitutions in the frameworks so that the frameworks may not be exact copies of expressed human immunoglobulin or human immunoglobulin germline gene sequences.

[0119] “Human antibody” refers to an antibody that is optimized to have minimal immune response when administered to a human subject. Variable regions of human antibody are derived from human immunoglobulin sequences. If human antibody contains a constant region or a portion of the constant region, the constant region is also derived from human immunoglobulin sequences. Human antibody comprises heavy and light chain variable regions that are “derived from” sequences of human origin if the variable regions of the human antibody are obtained from a system that uses human germline immunoglobulin or rearranged immunoglobulin genes. Such exemplary systems are human immunoglobulin gene libraries displayed on phage, and transgenic non-human animals such as mice or rats carrying human immunoglobulin loci. “Human antibody” typically contains amino acid differences when compared to the immunoglobulins expressed in humans due to differences between the systems used to obtain the human antibody and human immunoglobulin loci, introduction of somatic mutations or intentional introduction of substitutions into the frameworks or CDRs, or both. Typically, “human antibody” is at least about 80%, 81%, 82%, 83%, 84%, 85%, 86%, 87%, 88%, 89%, 90%, 91%, 92%, 93%, 94%, 95%, 96%, 97%, 98% or 99% identical in amino acid sequence to an amino acid sequence encoded by human germline immunoglobulin or rearranged immunoglobulin genes. In some cases, “human antibody” may contain consensus framework sequences derived from human framework sequence analyses, for example as described in Knappik et al., (2000) J Mol Biol 296:57-86, or synthetic HCDR3 incorporated into human immunoglobulin gene libraries displayed on phage, for example as described in Shi et al., (2010) J Mol Biol 397:385-96, and in Int. Patent Publ. No. WO2009/085462.

[0120] “Percent (%) amino acid sequence identity” with respect to a reference polypeptide sequence is defined as the percentage of amino acid residues in a candidate sequence that are identical with the amino acid residues in the reference polypeptide sequence, after aligning the sequences and introducing gaps, if necessary, to achieve the maximum percent sequence identity, and not considering any conservative substitutions as part of the sequence identity. Alignment for purposes of determining percent amino acid sequence identity can be achieved in various ways that are within the skill in the art, for instance, using publicly available computer software such as BLAST, BLAST-2, ALIGN or Megalign (DNASTAR) software. Those skilled in the art can determine appropriate parameters for aligning sequences, including any algorithms needed to achieve maximal alignment over the full length of the sequences being compared. For purposes herein, however, % amino acid sequence identify values are generated using the sequence comparison computer program ALIGN-2. The ALIGN-2 sequence comparison computer program was authored by Genentech. Inc., and the source code has been filed with user documentation in the U.S. Copyright Office, Washington D.C., 20559, where it is registered under U.S. Copyright Registration No. TXU510087. The ALIGN-2 program is publicly available from Genentech. Inc., South San Francisco, Calif., or may be compiled from the source code. The ALIGN-2 program should be compiled for use on a UNIX operating system, including digital UNIX V4.0D. All sequence comparison parameters are set by the ALIGN-2 program and do not vary. Where ALIGN-2 is employed for amino acid sequence comparisons, the % amino acid sequence identity of a given amino acid sequence A to, with, or against a given amino acid sequence B (which can alternatively be phrased as a given amino acid sequence A that has or comprises a certain % amino acid sequence identity to, with, or against a given amino acid sequence B) is calculated as follows:

100 times the fraction X/Y,

[0121] where X is the number of amino acid residues scored as identical matches by the sequence alignment program ALIGN-2 in that program's alignment of A and B, and where Y is the total number of amino acid residues in B. It will be appreciated that where the length of amino acid sequence A is not equal to the length of amino acid sequence B, the % amino acid sequence identity of A to B will not equal the % amino acid sequence identity of B to A. Unless specifically stated otherwise, all % amino acid sequence identity values used herein are obtained as described in the immediately preceding paragraph using the ALIGN-2 computer program.

[0122] Antibodies in which antigen binding sites are derived from a non-human species are not included in the definition of “human antibody”.

[0123] “Recombinant” refers to DNA, antibodies and other proteins that are prepared, expressed, created or isolated by recombinant means when segments from different sources are joined to produce recombinant DNA, antibodies or proteins.

[0124] “Epitope” refers to a portion of an antigen to which an antibody specifically binds. Epitopes typically consist of chemically active (such as polar, non-polar or hydrophobic) surface groupings of moieties such as amino acids or polysaccharide side chains and may have specific three-dimensional structural characteristics, as well as specific charge characteristics. An epitope may be composed of contiguous and/or discontiguous amino acids that form a conformational spatial unit. For a discontiguous epitope, amino acids from differing portions of the linear sequence of the antigen come in close proximity in 3-dimensional space through the folding of the protein molecule. Antibody “epitope” depends on the methodology used to identify the epitope.

[0125] “Paratope” refers to a portion of an antibody to which an antigen specifically binds. A paratope may be linear in nature or may be discontinuous, formed by a spatial relationship between non-contiguous amino acids of an antibody rather than a linear series of amino acids. A “light chain paratope” and a “heavy chain paratope” or “light chain paratope amino acid residues” and “heavy chain paratope amino acid residues” refer to antibody light chain and heavy chain residues in contact with an antigen, respectively, or in general, “antibody paratope residues” refer to those antibody amino acids that are in contact with antigen.

[0126] “Bispecific” refers to an antibody that specifically binds two distinct antigens or two distinct epitopes within the same antigen. The bispecific antibody may have cross-reactivity to other related antigens, for example to the same antigen from other species (homologs), such as human or monkey, for example Macaca fascicularis (cynomolgus, cyno) or Pan troglodytes, or may bind an epitope that is shared between two or more distinct antigens.

[0127] “Multispecific” refers to an antibody that specifically binds two or more distinct antigens or two or more distinct epitopes within the same antigen. The multispecific antibody may have cross-reactivity to other related antigens, for example to the same antigen from other species (homologs), such as human or monkey, for example Macaca fascicularis (cynomolgus, cyno) or Pan troglodytes, or may bind an epitope that is shared between two or more distinct antigens.

[0128] “Variant” refers to a polypeptide or a polynucleotide that differs from a reference polypeptide or a reference polynucleotide by one or more modifications, for example one or more substitutions, insertions or deletions.

[0129] “Vector” refers to a polynucleotide capable of being duplicated within a biological system or that can be moved between such systems. Vector polynucleotides typically contain elements, such as origins of replication, promoter, polyadenylation signal and selection markers, that function to facilitate the duplication or maintenance of these polynucleotides in a biological system, such as a cell, virus, animal, plant, and reconstituted biological systems utilizing biological components capable of duplicating a vector. The vector polynucleotide may be DNA or RNA molecules or a hybrid of these, single stranded or double stranded.

[0130] “Expression vector” refers to a vector that can be utilized in a biological system or in a reconstituted biological system to direct the translation of a polypeptide encoded by a polynucleotide sequence present in the expression vector.

[0131] “Polynucleotide” refers to a molecule comprising a chain of nucleotides covalently linked by a sugar-phosphate backbone or other equivalent covalent chemistry. Double and single-stranded DNA and RNA are typical examples of polynucleotides. “Polynucleotide” may refer to a synthetic molecule comprising a chain of nucleotides covalently linked by a sugar-phosphate backbone or other equivalent covalent chemistry. cDNA is an exemplary synthetic polynucleotide.

[0132] “Polypeptide” or “protein” refers to a molecule that comprises at least two amino acid residues linked by a peptide bond to form a polypeptide. Small polypeptides of less than 50 amino acids may be referred to as “peptides”.

[0133] “Flow cytometry” is a technology that is used to analyze the physical and chemical characteristics of particles in a fluid as it passes through at least one laser. Cell components are fluorescently labelled and then excited by the laser to emit light at varying wavelengths (Adan, et al, Critical Reviews in Biotechnology (2016) 1549-7801).

[0134] “Anti-idiotypic (anti-Id) antibody” is an antibody that recognizes the antigenic determinants (e.g. the paratope or CDRs) of the antibody. It is generally known in the art the process of producing or preparing an anti-idiotypic antibody. (Lathey, J. et al Immunology 1986 57(1):29-35). The anti-Id antibody may be antigen-blocking or non-blocking. The antigen-blocking anti-Id antibody may be used to detect the free antibody in a sample, e.g. CD3. The non-blocking anti-Id antibody may be used to detect the total antibody (free, partially bound to antigen, or fully bound to antigen) in a sample. An anti-Id antibody may be prepared by immunizing an animal with the antibody to which an anti-Id antibody is being prepared. In some embodiments described herein, the anti-idiotypic antibody is used for detecting the level of the therapeutic antibodies in a sample.

[0135] An anti-Id antibody may also be used as an immunogen to induce an immune response in yet another animal, producing a so-called anti-anti-Id antibody. An anti-anti-Id antibody may be epitopically identical to the original mAb, which induced the anti-Id antibody. Thus, by using antibodies to the idiotypic determinants of a mAb, it is possible to identify other clones expressing antibodies of identical specificity. Anti-Id antibodies may be varied (thereby producing anti-Id antibody variants) and/or derivatized by any suitable technique, such as those described elsewhere herein with respect to the anti-CD3 antibodies.

[0136] PSMA refers to Prostate Specific Membrane Antigen. The amino acid sequence of Pan troglodytes (also referred to as chimpanzee or chimp) PSMA is shown in SEQ ID NO: 49. The extracellular domain spans residues 44-750, the transmembrane domain spans residues 20-43 and the cytoplasmic domain spans residues 1-19 of SEQ ID NO: 49. The amino acid sequence of the Macaca fascicularis (also referred to as cynomolgus monkey, macaque or cyno) PSMA is shown in SEQ ID NO: 50. The extracellular domain spans residues 44-750, the transmembrane domain spans residues 20-43 and the cytoplasmic domain spans residues 1-19 of SEQ ID NO: 50. The amino acid sequence of the human PSMA is shown in SEQ ID NO:51. The extracellular domain spans residues 44-750, the transmembrane domain spans residues 20-43 and the cytoplasmic domain spans residues 1-19 of SEQ ID NO:51.

[0137] Throughout the specification, “CD3-specific” or “specifically binds CD3” or “anti-CD3 antibody” refers to antibodies that bind specifically to the CD3-epsilon polypeptide (SEQ ID NO:635), including antibodies that bind specifically to the CD3-epsilon extracellular domain (ECD) (SEQ ID NO:636). CD3-epsilon, together with CD3-gamma, -delta and -zeta, and the T-cell receptor alpha/beta and gamma/delta heterodimers, forms the T-cell receptor-CD3 complex. This complex plays an important role in coupling antigen recognition to several intracellular signal-transduction pathways. The CD3 complex mediates signal transduction, resulting in T cell activation and proliferation. CD3 is required for the immune response.

(Human CD3 epsilon)
SEQ ID NO: 635
MQSGTHWRVLGLCLLSVGVWGQDGNEEMGGITQTPYKVSISGTTVILTCPQ
YPGSEILWQHNDKNIGGDEDDKNIGSDEDHLSLKEFSELEQSGYYVCYPRG
SKPEDANFYLYLRARVCENCMEMDVMSVATIVIVDICITGGLLLLVYYWSK
NRKAKAKPVTRGAGAGGRQRGQNKERPPPVPNPDYEPIRKGQRDLYSGLNQ
RRI
(Human CD3 epsilon extracellular domain)
SEQ ID NO: 636
DGNEEMGGITQTPYKVSISGTTVILTCPQYPGSEILWQHNDKNIGGDEDDK
NIGSDEDHLSLKEFSELEQSGYYVCYPRGSKPEDANFYLYLRARVCENCME
MD

[0138] As used herein, the terms “interleukin-1 receptor accessory protein”, “IL1RAP” and “IL1-RAP” specifically include the human IL1RAP protein, for example as described in GenBank Accession No. AAB84059, NCBI Reference Sequence: NP_002173.1 and UniProtKB/Swiss-Prot Accession No. Q9NPH3-1 (see also Huang et al., 1997, Proc. Natl. Acad. Sci. USA. 94 (24), 12829-12832). IL1RAP is also known in the scientific literature as IL1 R3, C3orf13, FLJ37788, IL-1 RAcP and EG3556.

[0139] “CD33” refers to cluster of differentiation 33 protein. CD33 is a 67 kilodalton (kD) single pass transmembrane glycoprotein and is a member of the sialic acid-binding immunoglobulin-like lectins (Siglecs) family. CD33 is primarily considered to be a myeloid differentiation antigen, with low expression in myeloid progenitors, neutrophils and macrophages and high expression in circulating monocytes and dendritic cells. Human CD33 extracellular domain (Uniprot P20138) (SEQ ID NO:636) and cynomolgus CD33 (XP_005590138.1) are examples of proteins for use in generating CD33-specific antibodies according to the present disclosure.

[0140] “TMEFF2” refers to human transmembrane protein with EGF like and two follistatin like domains 2, also called tomoregulin 2. The amino acid sequence of the full length human TMEFF2 is shown in SEQ ID NO: 77. The extracellular domain of TMEFF2 is shown in SEQ ID NO: 575 and spans residues 40-374 of the full length TMEFF2. TMEFF2 extracellular domain harbors three distinct subdomains, the Kazal-like 1 (residues 85-137), the Kazal-like 2 (residues 176-229) and the EGF domain (residues 261-301). The TMEFF2 EGF domain is shown in SEQ ID NO: 577. The TMEFF2 “membrane proximal region” refers to the TMEFF2 region of SEQ ID NO: 629, which encompasses the EGF domain and the N—C-terminal linker regions (e.g. residues 230-320 of full length human TMEFF2 of SEQ ID NO: 77). All references to proteins, polypeptides and protein fragments herein are intended to refer to the human version of the respective protein, polypeptide or protein fragment unless explicitly specified as being from a non-human species. Thus, “TMEFF2” means human TMEFF2 unless specified as being from a non-human species, e.g., “mouse TMEFF2” or “monkey TMEFF2” etc.

(full length human TMEFF2)
SEQ ID NO: 77
MVLWESPRQCSSWTLCEGFCWLLLLPVMLLIVARPVKLAAFPTSLSDCQTP
TGWNCSGYDDRENDLFLCDTNTCKFDGECLRIGDTVTCVCQFKCNNDYVPV
CGSNGESYQNECYLRQAACKQQSEILVVSEGSCATDAGSGSGDGVHEGSGE
TSQKETSTCDICQFGAECDEDAEDVWCVCNIDCSQTNFNPLCASDGKSYDN
ACQIKEASCQKQEKIEVMSLGRCQDNTTTTTKSEDGHYARTDYAENANKLE
ESAREHHIPCPEHYNGFCMHGKCEHSINMQEPSCRCDAGYTGQHCEKKDYS
VLYVVPGPVRFQYVLIAAVIGTIQIAVICVVVLCITRKCPRSNRIHRQKQN
TGHYSSDNTTRASTRLI
(extracellular domain of human TMEFF2)
SEQ ID NO: 575
FPTSLSDCQTPTGWNCSGYDDRENDLFLCDTNTCKFDGECLRIGDTVTCVC
QFKCNNDYVPVCGSNGESYQNECYLRQAACKQQSEILVVSEGSCATDAGSG
SGDGVHEGSGETSQKETSTCDICQFGAECDEDAEDVWCVCNIDCSQTNFNP
LCASDGKSYDNACQIKEASCQKQEKIEVMSLGRCQDNTTTTTKSEDGHYAR
TDYAENANKLEESAREHHIPCPEHYNGECMHGKCEHSINMQEPSCRCDAGY
TGQHCEKKDYSVLYVVPGPVRFQYVLIAAVIGTIQIAVICVVVLCITRKCP
RSNRIHRQKQNTGHYSSDNTTRASTRLI
TMEFF2 EGF domain
SEQ ID NO: 577
HHIPCPEHYNGFCMHGKCEHSINMQEPSCRCDAGYTGQHCE
TMEFF2 membrane proximal region
SEQ ID NO: 629
NTTTTTKSEDGHYARTDYAENANKLEESAREHHIPCPEHYNGFCMHGKCEH
SINMQEPSCRCDAGYTGQHCEKKDYSVLYVVPGPVRFQYV

[0141] “TMEFF2 positive cancer” refers to a cancer tissue or a cancer cell that displays measurable level of TMEFF2 protein. Level of TMEFF2 protein may be measured using well known assays using, for example ELISA, immunofluorescence, flow cytometry or radioimmunoassay on live or lysed cells. “Overexpress”, “overexpressed” and “overexpressing” interchangeably refers to a sample such as a cancer cell, malignant cell or cancer tissue that has measurably higher levels of tumor antigen when compared to a reference sample. The overexpression may be caused by gene amplification or by increased transcription or translation. Expression and overexpression of protein in the sample may be measured using well-known assays using, for example ELISA, immunofluorescence, flow cytometry or radioimmunoassay on live or lysed cells. Expression and overexpression of a polynucleotide in the sample may be measured, for example, using fluorescent in situ hybridization, Southern blotting, or PCR techniques. A protein or a polynucleotide is overexpressed when the level of the protein or the polynucleotide in the sample is at least 1.5-fold higher when compared to the reference sample. Selection of the reference sample is well known.

[0142] “Sample” refers to a collection of similar fluids, cells, or tissues isolated from a subject, as well as fluids, cells, or tissues present within a subject. Exemplary samples are biological fluids such as blood, serum and serosal fluids, plasma, lymph, urine, saliva, cystic fluid, tear drops, feces, sputum, mucosal secretions of the secretory tissues and organs, vaginal secretions, ascites fluids such as those associated with non-solid tumors, fluids of the pleural, pericardial, peritoneal, abdominal and other body cavities, fluids collected by bronchial lavage, liquid solutions contacted with a subject or biological source, for example, cell and organ culture medium including cell or organ conditioned medium, lavage fluids and the like, tissue biopsies, fine needle aspirations or surgically resected tumor tissue.

[0143] A “cancer cell” or a “tumor cell” as used herein refers to a cancerous, pre-cancerous or transformed cell, either in vivo, ex vivo, or in tissue culture, that has spontaneous or induced phenotypic changes. These changes do not necessarily involve the uptake of new genetic material. Although transformation may arise from infection with a transforming virus and incorporation of new genomic nucleic acid or uptake of exogenous nucleic acid, it can also arise spontaneously or following exposure to a carcinogen, thereby mutating an endogenous gene. Transformation/cancer is exemplified by morphological changes, immortalization of cells, aberrant growth control, foci formation, proliferation, malignancy, modulation of tumor specific marker levels, invasiveness, tumor growth in suitable animal hosts such as nude mice, and the like, in vitro, in vivo, and ex vivo (Freshney, Culture of Animal Cells: A Manual of Basic Technique (3rd ed. 1994)).

[0144] Unless otherwise stated, any numerical values, such as a concentration or a concentration range described herein, are to be understood as being modified in all instances by the term “about.” Thus, a numerical value typically includes ±10% of the recited value. For example, a concentration of 1 mg/mL includes 0.9 mg/mL to 1.1 mg/mL. Likewise, a concentration range of 1% to 10% (w/v) includes 0.9% (w/v) to 11% (w/v). As used herein, the use of a numerical range expressly includes all possible subranges, all individual numerical values within that range, including integers within such ranges and fractions of the values unless the context clearly indicates otherwise.

[0145] “Effector antigens” are antigens from cells of the immune system that can stimulate or trigger cytotoxicity, phagocytosis, antigen presentation, and/or cytokine release. Such effector antigens are from, for example but not limited to, T cells and natural killer (NK) cells. Examples of suitable specificities for effector antigens include but are not limited to CD3 or CD3 subunits such as CD3ε for T cells and CD16 for NK cells. Such cell surface molecules of effector cells are suitable for mediating cell killing. Effector cells are cells of the immune system that can stimulate or trigger cytotoxicity, phagocytosis, antigen presentation, and/or cytokine release. Such effector cells are, for example but not limited to, T-cells, natural killer (NK) cells, granulocytes, monocytes, macrophages, dendritic cells, and antigen-presenting cells. Examples of suitable specificities for effector cells include but are not limited to CD2, CD3 and CD3 subunits such as CD3e, CD5, CD28 and other components of the T-cell receptor (TCR) for T cells; CD16, CD16A, CD25, CD38, CD44, CD56, CD69, CD94, CD335 (NKp46), CD336, (NKp44), CD337 (NKp30), NKp80, NKG2C and NKG2D, DNAM, NCRs for NK cells; CD18, CD64 and CD89 for granulocytes; CD18, CD32, CD64, CD89 and mannose receptor for monocytes and macrophages; CD64 and mannose receptor for dendritic cells; as well as CD35. In certain embodiments of the inventions, those specificities, i.e. cell surface molecules, of effector cells are suitable for mediating cell killing upon binding of a bispecific or multispecific molecules to such cell surface molecule and, thereby, inducing cytolysis or apoptosis.

[0146] “Bispecific CD3 antibody” refers to a molecule comprising at least one binding domain specifically binding CD3 and at least one binding domain specifically binding a second antigen, such as a bispecific antibody comprising a first domain that specifically binds CD3 and a second domain that specifically binds a second antigen. The domains specifically binding CD3 and a second antigen are typically V_{H}/V_{L} pairs. The bispecific CD3 antibody may be monovalent in terms of its binding to either CD3 or the second antigen. In some embodiments, the second, or target, antigen is a cell surface antigen that is expressed on a target cell other than an immune effector cell. In some embodiments, the second antigen a tumor associated antigen (TAA). Exemplary TAAs are PSMA, CD33, IL1RAP, and TMEFF2.

[0147] “Bispecific PSMA×CD3 antibody”, “PSMA/CD3 antibody”, “bispecific anti-PSMA×CD3 antibody” or “anti-PSMA/CD3 antibody” and the like refer to a molecule comprising at least one binding domain specifically binding PSMA and at least one binding domain specifically binding CD3. The domains specifically binding PSMA and CD3 are typically V_{H}/V_{L} pairs. The bispecific anti-PSMA×CD3 antibody may be monovalent in terms of its binding to either PSMA or CD3.

[0148] “Bispecific CD33×CD3 antibody”, “CD33/CD3 antibody”, “bispecific anti-CD33×CD3 antibody” or “anti-CD33/CD3 antibody” and the like refer to a molecule comprising at least one binding domain specifically binding CD33 and at least one binding domain specifically binding CD3. The domains specifically binding CD33 and CD3 are typically V_{H}/V_{L} pairs. The bispecific anti-CD33×CD3 antibody may be monovalent in terms of its binding to either CD33 or CD3.

[0149] “Bispecific IL1RAP×CD3 antibody”, “IL1RAP/CD3 antibody”, “bispecific anti-IL1RAP×CD3 antibody” or “anti-IL1RAP/CD3 antibody” and the like refer to a molecule comprising at least one binding domain specifically binding IL1RAP and at least one binding domain specifically binding CD3. The domains specifically binding IL1RAP and CD3 are typically V_{H}/V_{L} pairs. The bispecific anti-IL1RAP×CD3 antibody may be monovalent in terms of its binding to either IL1RAP or CD3.

[0150] “Bispecific anti-TMEFF2/anti-CD3 antibody”, TMEFF2/CD3 antibody, TMEFF2×CD3 antibody and the like refer to an antibody that binds TMEFF2 and CD3.

[0151] “Valent” refers to the presence of a specified number of binding sites specific for an antigen in a molecule. As such, the terms “monovalent”, “bivalent”, “tetravalent”, and “hexavalent” refer to the presence of one, two, four and six binding sites, respectively, specific for an antigen in a molecule. “Multivalent” refers to the presence of two or more binding sites specific for an antigen in a molecule.

[0152] “An antigen specific CD4+ or CD8+ T cell” refers to a CD4+ or CD8+ T cell activated by a specific antigen, or immunostimulatory epitope thereof.

[0153] “Subject” includes any human or nonhuman animal. “Nonhuman animal” includes all vertebrates, e.g., mammals and non-mammals, such as nonhuman primates, sheep, dogs, cats, horses, cows chickens, amphibians, reptiles, etc. Except when noted, the terms “patient” or “subject” are used interchangeably.

[0154] The numbering of amino acid residues in the antibody constant region throughout the specification is according to the EU index as described in Kabat et al., Sequences of Proteins of Immunological Interest, 5th Ed. Public Health Service, National Institutes of Health, Bethesda, Md. (1991), unless otherwise explicitly stated.

TABLE 1
Conventional one- and three-letter amino acid codes used herein

| Amino acid | Three-letter code | One-letter code |
|---|---|---|
| Alanine | Ala | A |
| Arginine | Arg | R |
| Asparagine | Asn | N |
| Aspartate | Asp | D |
| Cysteine | Cys | C |
| Glutamate | Gln | E |
| Glutamine | Glu | Q |
| Glycine | Gly | G |
| Histidine | His | H |
| Isoleucine | Ile | I |
| Lysine | Lys | K |
| Methionine | Met | M |
| Phenylalanine | Phe | F |
| Proline | Pro | P |
| Serine | Ser | S |
| Threonine | Thr | T |
| Tryptophan | Trp | W |
| Tyrosine | Tyr | Y |
| Valine | Val | V |

[0155] Compositions of Matter

[0156] The present invention provides anti-CD3 antibodies and antigen-binding fragments thereof, antibodies and antigen-binding fragments thereof that specifically bind PSMA, antibodies and antigen-binding fragments thereof that specifically bind CD33, antibodies and antigen-binding fragments thereof that specifically bind IL1RAP, multispecific antibodies comprising a first domain that specifically binds CD3 and a second domain that specifically binds a second antigen, and multispecific antibodies that specifically bind CD3 and one or more of PSMA, CD33, IL1RAP, and TMEFF2. The present invention provides polypeptides and polynucleotides encoding the antibodies of the invention or complementary nucleic acids thereof, vectors, host cells, and methods of making and using them.

[0157] General Aspects of the Antibodies Described Herein

[0158] The anti-CD3 antibodies or antigen-binding fragments described herein include variants having single or multiple amino acid substitutions, deletions, or additions that retain the biological properties (e.g., binding affinity or immune effector activity) of the described anti-CD3 antibodies or antigen-binding fragments. In the context of the present invention the following notations are, unless otherwise indicated, used to describe a mutation; i) substitution of an amino acid in a given position is written as e.g. K409R which means a substitution of a Lysine in position 409 with an Arginine; and ii) for specific variants the specific three or one letter codes are used, including the codes Xaa and X to indicate any amino acid residue. Thus, the substitution of Arginine for Lysine in position 409 is designated as: K409R, or the substitution of any amino acid residue for Lysine in position 409 is designated as K409X. In case of deletion of Lysine in position 409 it is indicated by K409*. The skilled person may produce variants having single or multiple amino acid substitutions, deletions, or additions.

[0159] These variants may include: (a) variants in which one or more amino acid residues are substituted with conservative or nonconservative amino acids, (b) variants in which one or more amino acids are added to or deleted from the polypeptide, (c) variants in which one or more amino acids include a substituent group, and (d) variants in which the polypeptide is fused with another peptide or polypeptide such as a fusion partner, a protein tag or other chemical moiety, that may confer useful properties to the polypeptide, such as, for example, an epitope for an antibody, a polyhistidine sequence, a biotin moiety and the like. Antibodies or antigen-binding fragments described herein may include variants in which amino acid residues from one species are substituted for the corresponding residue in another species, either at the conserved or nonconserved positions. In other embodiments, amino acid residues at nonconserved positions are substituted with conservative or nonconservative residues. The techniques for obtaining these variants, including genetic (deletions, mutations, etc.), chemical, and enzymatic techniques, are known to persons having ordinary skill in the art.

[0160] The antibodies or antigen-binding fragments described herein may be an IgM, an IgD, an IgG, an IgA or an IgE isotype. In some embodiments, the antibody isotype is an IgG1, an IgG2, an IgG3, or an IgG4 isotype. In some embodiments, the antibody is an IgG1 isotype. In some embodiments, the antibody is an IgG2 isotype. In some embodiments, the antibody is an IgG3 isotype. In some embodiments, the antibody is an IgG4 isotype. The specificity of the antibody or antigen-binding fragment thereof is in part determined by the amino acid sequence and arrangement, of the CDRs. Therefore, the CDRs of one isotype may be transferred to another isotype without altering antigen specificity. Accordingly, such antibody isotypes are within the scope of the described antibodies or antigen-binding fragments.

[0161] The IgG class is divided in four isotypes: IgG1, IgG2, IgG3 and IgG4 in humans. They share more than 95% homology in the amino acid sequences in the CH1, CH2 and CH3 regions but show major differences in the amino acid composition and structure of the hinge region. The Fc region mediates effector functions, such as antibody-dependent cellular cytotoxicity (ADCC), antibody-dependent cellular phagocytosis (ADCP) and complement-dependent cytotoxicity (CDC). In ADCC, the Fc region binds to Fc receptors (FcγRs) on the surface of immune effector cells such as natural killer cells and macrophages, leading to the lysis of the targeted cells. In CDC, the antibodies mediate targeted cell killing by triggering the complement cascade at the cell surface. In ADCP, the antibody mediates elimination of antibody-coated target cells by internalization by phagocytic cells, such as macrophages or dendritic cells. The antibodies described herein include antibodies with the described features of the variable domains in combination with any of the IgG isotypes, including modified versions in which the Fc region has been modified to modulate the various effector functions.

[0162] For many applications of therapeutic antibodies, Fc-mediated effector functions are not desired as they may potentially pose a safety risk due to cell depletion. Modifying effector functions can be achieved by engineering the Fc regions to reduce their binding to FcγRs or the complement factors. The binding of IgG to the activating (FcγRI, FcγRIIa, FcγRIIIa and FcγRIIIb) and inhibitory (FcγRIIb) FcγRs or the first component of complement (C1q) depends on residues located in the hinge region and the CH2 domain. Mutations may be introduced in IgG1, IgG2 and IgG4 to reduce or silence Fc-mediated effector functions. The antibodies described herein may include these modifications.

[0163] In some embodiments, the anti-CD3, the anti-PSMA, the anti-CD33, and/or the anti-IL1RAP antibodies comprise an engineered Fc region having one or more of the following properties: (a) reduced effector function when compared to the parental Fc; (b) reduced affinity to FcγRI, FcγRIIa, FcγRIIb, FcγRIIIb and/or FcγRIIIa; (c) reduced affinity to FcγRI; (d) reduced affinity to FcγRIIa; (e) reduced affinity to FcγRIIIb; or (f) reduced affinity to FcγRIIIa.

[0164] In some embodiments, the anti-CD3, the anti-PSMA, the anti-CD33, and/or the anti-IL1RAP antibodies are, e.g., IgG1, IgG2, IgG3, or IgG4 isotypes. In some embodiments wherein the antibody has an IgG4 isotype, the antibody contains S228P, F234A, and L235A substitutions in its Fc region when compared to the wild-type IgG4. In some embodiments wherein the antibody has an IgG1 isotype, the antibody contains L234A, and L235A substitutions in its Fc region. The antibodies described herein may include these modifications.

[0165] In some embodiments, the anti-CD3, the anti-PSMA, the anti-CD33, and/or the anti-IL1RAP antibodies are an IgG4 isotype, optionally comprising a heavy chain substitution S228P.

[0166] In some embodiments, the anti-CD3, the anti-PSMA, the anti-CD33, and/or the anti-IL1RAP antibodies are an IgG1 isotype, optionally comprising heavy chain substitutions L234A, G237A, P238S, H268A, A330S and P331S when compared to the wild type IgG1.

[0167] In some embodiments, the anti-CD3, the anti-PSMA, the anti-CD33, and/or the anti-IL1RAP antibodies are an IgG2 isotype, optionally comprising heavy chain substitutions L234A, G237A, P238S, H268A, V309L, A330S and P331S when compared to the wild type IgG2.

Wild-type IgG4
(SEQ ID NO: 602)
ASTKGPSVFPLAPCSRSTSESTAALGCLVKDYFPEPVTVSWNSGALTSGVH
TFPAVLQSSGLYSLSSVVTVPSSSLGTKTYTCNVDHKPSNTKVDKRVESKY
GPPCPSCPAPEFLGGPSVFLFPPKPKDTLMISRTPEVTCVVVDVSQEDPEV
QFNWYVDGVEVHNAKTKPREEQFNSTYRVVSVLTVLHQDWLNGKEYKCKVS
NKGLPSSIEKTISKAKGQPREPQVYTLPPSQEEMTKNQVSLTCLVKGFYPS
DIAVEWESNGQPENNYKTTPPVLDSDGSFFLYSRLTVDKSRWQEGNVFSCS
VMHEALHNHYTQKSLSLSLGK
Wild-type IgG1
(SEQ ID NO: 601)
ASTKGPSVFPLAPSSKSTSGGTAALGCLVKDYFPEPVTVSWNSGALTSGVH
TFPAVLQSSGLYSLSSVVTVPSSSLGTQTYICNVNHKPSNTKVDKKVEPKS
CDKTHTCPPCPAPELLGGPSVFLFPPKPKDTLMISRTPEVTCVVVDVSHED
PEVKFNWYVDGVEVHNAKTKPREEQYNSTYRVVSVLTVLHQDWLNGKEYKC
KVSNKALPAPIEKTISKAKGQPREPQVYTLPPSRDELTKNQVSLTCLVKGF
YPSDIAVEWESNGQPENNYKTTPPVLDSDGSFFLYSKLTVDKSRWQQGNVF
SCSVMHEALHNHYTQKSLSLSPGK
Wild-type IgG2
(SEQ ID NO: 711)
ASTKGPSVFPLAPCSRSTSESTAALGCLVKDYFPEPVTVSWNSGALTSGVH
TFPAVLQSSGLYSLSSVVTVPSSNFGTQTYTCNVDHKPSNTKVDKTVERKC
CVECPPCPAPPVAGPSVFLFPPKPKDTLMISRTPEVTCVVVDVSHEDPEVQ
FNWYVDGVEVHNAKTKPREEQFNSTFRVVSVLTVVHQDWLNGKEYKCKVSN
KGLPAPIEKTISKTKGQPREPQVYTLPPSREEMTKNQVSLTCLVKGFYPSD
ISVEWESNGQPENNYKTTPPMLDSDGSFFLYSKLTVDKSRWQQGNVFSCSV
MHEALHNHYTQKSLSLSPGK

[0168] In certain embodiments, labelled anti-CD3, anti-PSMA, anti-CD33, and/or anti-IL1RAP antibodies are provided. Exemplary labels or moieties that are detected directly (e.g., fluorescent, chromophoric, electron-dense, chemiluminescent, and radioactive labels) and labels and moieties (e.g., enzymes or ligands) that are detected indirectly (e.g., through enzymatic reaction or molecular interaction). Exemplary labels include radiolabels (e.g., ³²P, ¹⁴C, ¹¹¹, ¹²⁵I, ³H, ¹³¹I), fluorescent labels (such as DyLight® 649), epitope tags, biotin, chromophore labels, ECL labels, or enzymes. More specifically, the described labels include ruthenium, ¹¹¹In-DOTA, ¹¹¹In-diethylenetriaminepentaacetic acid (DTPA), horseradish peroxidase, alkaline phosphatase and beta-galactosidase, poly-histidine (HIS tag), acridine dyes, cyanine dyes, fluorone dyes, oxazin dyes, phenanthridine dyes, rhodamine dyes, Alexafluor® dyes, and the like.

[0169] In addition to the described anti-CD3, anti-PSMA, anti-CD33, and/or anti-IL1RAP antibodies and antigen-binding fragments, also provided are polynucleotide sequences capable of encoding the described antibodies and antigen-binding fragments. Vectors comprising the described polynucleotides are also provided, as are cells expressing the anti-CD3, anti-PSMA, anti-CD33, and/or anti-IL1RAP antibodies or antigen-binding fragments provided herein. Also described are cells capable of expressing the disclosed vectors. These cells may be mammalian cells (such as 293F cells, CHO cells), insect cells (such as Sf7 cells), yeast cells, plant cells, or bacteria cells (such as E. coli). The described antibodies may also be produced by hybridoma cells.

[0170] Generation of Monospecific Antibodies

[0171] In some embodiments, the anti-CD3, the anti-PSMA, the anti-CD33, the anti-TMEFF2, and/or the anti-IL1RAP antibodies of the invention are human.

[0172] In some embodiments, the anti-CD3, the anti-PSMA, the anti-CD33, the anti-TMEFF2, and/or the anti-IL1RAP antibodies of the invention are humanized.

[0173] Monospecific antibodies of the invention described herein (e.g. the anti-CD3, the anti-PSMA, the anti-CD33, the anti-TMEFF2, and/or the anti-IL1RAP antibodies) may be generated using various technologies. For example, the hybridoma method of Kohler and Milstein, Nature 256:495, 1975 may be used to generate monoclonal antibodies. In the hybridoma method, a mouse or other host animal, such as a hamster, rat or chicken, is immunized with human, chimpanzee, or macaque PSMA, CD33, IL1RAP, TMEFF2, or CD3 or fragments of PSMA, CD33, IL1RAP, TMEFF2, or CD3, such as the extracellular domain of PSMA, CD33, IL1RAP, TMEFF2, or CD3, followed by fusion of spleen cells from immunized animals with myeloma cells using standard methods to form hybridoma cells (Goding, Monoclonal Antibodies: Principles and Practice, pp. 59-103 (Academic Press, 1986)). Colonies arising from single immortalized hybridoma cells are screened for production of antibodies with desired properties, such as specificity of binding, cross-reactivity or lack thereof, and affinity for the antigen.

[0174] Various host animals may be used to produce the anti-CD3, the anti-PSMA, the anti-CD33, TMEFF2, and/or the anti-IL1RAP antibodies of the invention described herein. For example, Balb/c mice may be used to generate mouse anti-human PSMA antibodies. The antibodies made in Balb/c mice and other non-human animals may be humanized using various technologies to generate more human-like sequences.

[0175] Exemplary humanization techniques including selection of human acceptor frameworks are known and include CDR grafting (U.S. Pat. No. 5,225,539), SDR grafting (U.S. Pat. No. 6,818,749), Resurfacing (Padlan, (1991) Mol Immunol 28:489-499), Specificity Determining Residues Resurfacing (U.S. Patent Publ. No. 2010/0261620), human framework adaptation (U.S. Pat. No. 8,748,356) or superhumanization (U.S. Pat. No. 7,709,226). In these methods, CDRs of parental antibodies are transferred onto human frameworks that may be selected based on their overall homology to the parental frameworks, based on similarity in CDR length, or canonical structure identity, or a combination thereof.

[0176] Humanized antibodies may be further optimized to improve their selectivity or affinity to a desired antigen by incorporating altered framework support residues to preserve binding affinity (backmutations) by techniques such as those described in Int. Patent Publ. Nos. WO1090/007861 and WO1992/22653, or by introducing variation at any of the CDRs for example to improve affinity of the antibody.

[0177] Transgenic animals, such as mice or rat carrying human immunoglobulin (Ig) loci in their genome may be used to generate human antibodies against a target protein, and are described in for example U.S. Pat. No. 6,150,584, Int. Patent Publ. No. WO99/45962, Int. Patent Publ. Nos. WO2002/066630, WO2002/43478, WO2002/043478 and WO1990/04036, Lonberg et al (1994) Nature 368:856-9; Green et al (1994) Nature Genet. 7:13-21; Green & Jakobovits (1998) Exp. Med. 188:483-95; Lonberg and Huszar (1995) Int Rev Immunol 13:65-93; Bruggemann et al., (1991) Eur J Immunol 21:1323-1326; Fishwild et al., (1996) Nat Biotechnol 14:845-851; Mendez et al., (1997) Nat Genet 15:146-156; Green (1999) J Immunol Methods 231:11-23; Yang et al., (1999) Cancer Res 59:1236-1243; Bruggemann and Taussig (1997) Curr Opin Biotechnol 8:455-458. The endogenous immunoglobulin loci in such animal may be disrupted or deleted, and at least one complete or partial human immunoglobulin locus may be inserted into the genome of the animal using homologous or non-homologous recombination, using transchromosomes, or using minigenes. Companies such as Regeneron (http://_www_regeneron_com), Harbour Antibodies (http://_www_harbourantibodies_com), Open Monoclonal Technology, Inc. (OMT) (http://_www_omtinc_net), KyMab (http://_www_kymab_com), Trianni (http://_www.trianni_com) and Ablexis (http://_www_ablexis_com) may be engaged to provide human antibodies directed against a selected antigen using technologies as described above.

[0178] Human antibodies may be selected from a phage display library, where the phage is engineered to express human immunoglobulins or portions thereof such as Fabs, single chain antibodies (scFv), or unpaired or paired antibody variable regions (Knappik et al., (2000) J Mol Biol 296:57-86; Krebs et al., (2001) J Immunol Meth 254:67-84; Vaughan et al., (1996) Nature Biotechnology 14:309-314; Sheets et al., (1998) PITAS (USA) 95:6157-6162; Hoogenboom and Winter (1991) J Mol Biol 227:381; Marks et al., (1991) J Mol Biol 222:581). The antibodies of the invention may be isolated for example from phage display library expressing antibody heavy and light chain variable regions as fusion proteins with bacteriophage pIX coat protein as described in Shi et al., (2010) J Mol Biol 397:385-96, and Int. Patent Publ. No. WO09/085462). The libraries may be screened for phage binding to human and/or cyno PSMA, CD33, IL1RAP, TMEFF2, or CD3 and the obtained positive clones may be further characterized, the Fabs isolated from the clone lysates, and expressed as full length IgGs. Such phage display methods for isolating human antibodies are described in for example: U.S. Pat. Nos. 5,223,409, 5,403,484, 5,571,698, 5,427,908, 5,580,717, 5,969,108, 6,172,197, 5,885,793; 6,521,404; 6,544,731; 6,555,313; 6,582,915 and 6,593,081.

[0179] Preparation of immunogenic antigens and monoclonal antibody production may be performed using any suitable technique, such as recombinant protein production. The immunogenic antigens may be administered to an animal in the form of purified protein, or protein mixtures including whole cells or cell or tissue extracts, or the antigen may be formed de novo in the animal's body from nucleic acids encoding said antigen or a portion thereof.

[0180] Generation and Use of Bispecific and Multispecific CD3 Antibodies

[0181] The invention provides bispecific and multispecific antibodies comprising a first domain that specifically binds CD3 and a second domain that specifically binds a second antigen. The second antigen may be a tumor associated antigen (TAA) or an antigen on pathogenic cells.

[0182] Exemplary anti-CD3 antibodies that may be used to engineer bispecific and multispecific antibodies comprising a first domain that specifically binds CD3 and a second domain that specifically binds a second antigen include CD3 antibodies comprising the V_{H}/V_{L} sequences and heavy/light chain CDRs shown in Table 7A and 7B, respectively, and the engineered variants thereof described in Table 10 and Table 11, and accompanying text. For example, the CDRs and/or the VH/VL domains of the CD3 antibodies CD3B312, CD3B313, CD3B314, CD3B315, CD3B316, CD3B317, CD3B337, CD3B373, CD3B376, CD3B389, CD3B450, and CD3B467 described herein may be used to generate bispecific and multispecific antibodies comprising a first domain that specifically binds CD3 and a second domain that specifically binds a second antigen.

[0183] The herein described anti-CD3 antibody CDRs and/or the VH/VL domains may be incorporated into bispecific antibodies comprising a first domain that specifically binds CD3 and a second domain that specifically binds a second antigen.

[0184] The herein described anti-CD3 antibody CDRs and/or the VH/VL domains may be incorporated into bispecific antibodies comprising PSMA binding VH/VL domains described herein and in Table 23. The herein described anti-CD3 antibodies and/or the VH/VL domains may be incorporated into bispecific antibodies comprising IL1RAP binding VH/VL domains described herein and in Table 30. The herein described anti-CD3 antibody CDRs and/or the VH/VL domains may be incorporated into bispecific antibodies comprising CD33 binding VH/VL domains described herein and in Table 38. For example, the VH/VL domains of the PSMA antibodies PSMB119, PSMB120, PSMB121, PSMB122, PSMB123, PSMB87, PSMB126, PSMB127, PSMB128, PSMB129, PSMB130, PSMB120, PSMB121, PSMB122, PSMB123, PSMB127, PSMB128, PSMB130, PSMB344, PSMB345, PSMB346, PSMB347, PSMB349, PSMB358, PSMB359, PSMB360, PSMB361, PSMB362, PSMB363, and PSMB365 described herein may be used to generate bispecific PSMA×CD3 antibodies.

[0185] Exemplary TAAs are PSMA, CD33, TMEFF2, and IL1RAP. The exemplary multispecific PSMA×CD3, CD33×CD3, TMEFF2,×CD3, and IL1RAP×CD3 antibodies provided herein have a first domain that specifically bind CD3 and a second domain that specifically binds PSMA, CD33, TMEFF2, or IL1RAP. Exemplary anti-PSMA antibodies that may be used to engineer bispecific PSMA×CD3 molecules are those described herein, which may comprise heavy and light chain sequences including but not limited to the heavy and light chain sequences listed in Table 23. Exemplary anti-IL1RAP antibodies that may be used to engineer bispecific IL1RAP×CD3 molecules are those described herein, which may comprise heavy and light chain variable region sequences including but not limited to the heavy and light chain variable region sequences provided in Table 35. Exemplary anti-CD33 antibodies that may be used to engineer bispecific CD33×CD3 molecules are those described herein, which may comprise heavy and light chain variable region sequences including but not limited to the heavy and light chain variable region sequences provided in Table 43. Exemplary anti-TMEFF2 antibodies that may be used to engineer bispecific TMEFF2×CD3 molecules are those described herein, which may comprise heavy and light chain variable region sequences including but not limited to the heavy and light chain variable region sequences provided in Tables 59, 66-68.

[0186] The generated bispecific antibodies may be tested for their binding to CD3 and/or the second antigen and/or for their desired functional characteristics, such as T-cell mediated killing of cells that express the second antigen.

[0187] The bispecific antibodies provided herein include antibodies having a full-length antibody structure.

[0188] “Fab-arm” or “half molecule” refers to one heavy chain-light chain pair that specifically binds an antigen.

[0189] Full length bispecific antibodies as described herein may be generated for example using Fab arm exchange (or half molecule exchange) between two monospecific bivalent antibodies by introducing substitutions at the heavy chain CH3 interface in each half molecule to favor heterodimer formation of two antibody half molecules having distinct specificity either in vitro in cell-free environment or using co-expression. The Fab arm exchange reaction is the result of a disulfide-bond isomerization reaction and dissociation-association of CH3 domains. The heavy chain disulfide bonds in the hinge regions of the parental monospecific antibodies are reduced. The resulting free cysteines of one of the parental monospecific antibodies form an inter heavy-chain disulfide bond with cysteine residues of a second parental monospecific antibody molecule and simultaneously CH3 domains of the parental antibodies release and reform by dissociation-association. The CH3 domains of the Fab arms may be engineered to favor heterodimerization over homodimerization. The resulting product is a bispecific antibody having two Fab arms or half molecules, which each bind a distinct epitope, i.e. an epitope on CD3 and an epitope on the second antigen.

[0190] “Homodimerization” refers to an interaction of two heavy chains having identical CH3 amino acid sequences. “Homodimer” refers to an antibody having two heavy chains with identical CH3 amino acid sequences.

[0191] “Heterodimerization” refers to an interaction of two heavy chains having non-identical CH3 amino acid sequences. “Heterodimer” refers to an antibody having two heavy chains with non-identical CH3 amino acid sequences.

[0192] In some embodiments, the bispecific antibodies include designs such as the Triomab/Quadroma (Trion Pharma/Fresenius Biotech), Knob-in-Hole (Genentech), CrossMAbs (Roche) and the electrostatically-matched (Chugai, Amgen, NovoNordisk, Oncomed), the LUZ-Y (Genentech), the Strand Exchange Engineered Domain body (SEEDbody)(EMD Serono), the Biclonic (Merus) and the DuoBody® Technology (Genmab A/S).

[0193] The Triomab quadroma technology may be used to generate full-length bispecific antibodies, incorporating the VH and VL of the anti-CD3 antibodies of the invention. Triomab technology promotes Fab arm exchange between two parental chimeric antibodies, one parental mAb having IgG2a and the second parental mAb having rat IgG2b constant regions, yielding chimeric bispecific antibodies.

[0194] The “knob-in-hole” strategy (see, e.g., Intl. Publ. No. WO 2006/028936) may be used to generate full-length bispecific antibodies. Briefly, selected amino acids forming the interface of the CH3 domains in human IgG can be mutated at positions affecting CH3 domain interactions to promote heterodimer formation. An amino acid with a small side chain (hole) is introduced into a heavy chain of an antibody specifically binding a first antigen and an amino acid with a large side chain (knob) is introduced into a heavy chain of an antibody specifically binding a second antigen. After co-expression of the two antibodies, a heterodimer is formed as a result of the preferential interaction of the heavy chain with a “hole” with the heavy chain with a “knob”. Exemplary CH3 substitution pairs forming a knob and a hole are (expressed as modified position in the first CH3 domain of the first heavy chain/modified position in the second CH3 domain of the second heavy chain): T366Y/F405A, T366W/F405W, F405W/Y407A, T394W/Y407T, T394S/Y407A, T366W/T394S, F405W/T394S and T366W/T366S_L368A_Y407V.

[0195] The CrossMAb technology may be used to generate full-length bispecific antibodies. CrossMAbs, in addition to utilizing the “knob-in-hole” strategy to promoter Fab arm exchange, have in one of the half arms the CH1 and the CL domains exchanged to ensure correct light chain pairing of the resulting bispecific antibody (see e.g. U.S. Pat. No. 8,242,247).

[0196] Other cross-over strategies may be used to generate full length bispecific antibodies by exchanging variable or constant, or both domains between the heavy chain and the light chain or within the heavy chain in the bispecific antibodies, either in one or both arms. These exchanges include for example VH-CH1 with VL-CL, VH with VL, CH3 with CL and CH3 with CH1 as described in Int. Patent Publ. Nos. WO2009/080254, WO2009/080251, WO2009/018386 and WO2009/080252.

[0197] Other strategies such as promoting heavy chain heterodimerization using electrostatic interactions by substituting positively charged residues at one CH3 surface and negatively charged residues at a second CH3 surface may be used, as described in US Patent Publ. No. US2010/0015133; US Patent Publ. No. US2009/0182127; US Patent Publ. No. US2010/028637 or US Patent Publ. No. US2011/0123532. In other strategies, heterodimerization may be promoted by following substitutions (expressed as modified position in the first CH3 domain of the first heavy chain/modified position in the second CH3 domain of the second heavy chain): L351Y_F405A_Y407V/T394W, T366I_K392M_T394W/F405A_Y407V, T366L_K392M_T394W/F405A_Y407V, L351Y_Y407A/T366A_K409F, L351Y_Y407A/T366V_K409F, Y407A/T366A_K409F, or T350V_L351Y_F405A_Y407V/T350V_T366L_K392L_T394W as described in U.S. Patent Publ. No. US2012/0149876 or U.S. Patent Publ. No. US2013/0195849.

[0198] LUZ-Y technology may be utilized to generate bispecific antibodies. In this technology, a leucine zipper is added into the C terminus of the CH3 domains to drive the heterodimer assembly from parental mAbs that is removed post-purification as described in Wranik et al., (2012) J Biol Chem 287(52): 42221-9.

[0199] SEEDbody technology may be utilized to generate bispecific antibodies. SEEDbodies have, in their constant domains, select IgG residues substituted with IgA residues to promote heterodimerization as described in U.S. Patent No. US20070287170.

[0200] The bispecific antibodies described herein may be generated in vitro in a cell-free environment by introducing asymmetrical mutations in the CH3 regions of two monospecific homodimeric antibodies and forming the bispecific heterodimeric antibody from two parent monospecific homodimeric antibodies in reducing conditions to allow disulfide bond isomerization according to methods described in Int. Patent Publ. No. WO2011/131746). In the methods, the first monospecific bivalent antibody (i.e., the antibody that specifically binds the second antigen; e.g., anti-PSMA, anti-CD33, anti-TMEFF2 or anti-IL1RAP antibody) and the second monospecific bivalent antibody (i.e., anti-CD3 antibody) are engineered to have certain substitutions at the CH3 domain that promoter heterodimer stability; the antibodies are incubated together under reducing conditions sufficient to allow the cysteines in the hinge region to undergo disulfide bond isomerization; thereby generating the bispecific antibody by Fab arm exchange. The incubation conditions are restored to non-reducing. Exemplary reducing agents that may be used are 2-mercaptoethylamine (2-MEA), dithiothreitol (DTT), dithioerythritol (DTE), glutathione, tris(2-carboxyethyl)phosphine (TCEP), L-cysteine and beta-mercaptoethanol. For example, incubation for at least 90 min at a temperature of at least 20° C. in the presence of at least 25 mM 2-MEA or in the presence of at least 0.5 mM dithiothreitol at a pH of from 5-8, for example at pH of 7.0 or at pH of 7.4 may be used.

[0201] In some embodiments described herein, the bispecific antibody comprising a first domain that specifically binds CD3 and a second domain that specifically binds a second antigen comprises at least one substitution in an antibody CH3 constant domain.

[0202] In some embodiments described herein, the at least one substitution in the antibody CH3 constant domain is K409R, F405L or F405L and R409K substitution, wherein residue numbering is according to the EU Index.

[0203] Antibody domains and numbering are well known. “Asymmetrical” refers to non-identical substitutions in the two CH3 domains in two separate heavy chains in an antibody. An IgG1 CH3 region typically consists of residues 341-446 on IgG1 (residue numbering according to the EU index).

[0204] In some embodiments described herein, the bispecific antibody is an IgG1 isotype and comprises a F405L substitution in an antibody first heavy chain (HC1) and a K409R substitution in an antibody second heavy chain (HC2) when compared to the wild-type IgG1.

[0205] In some embodiments described herein, the bispecific antibody is an IgG1 isotype and comprises a K409R substitution in an antibody first heavy chain (HC1) and a F405L substitution in an antibody second heavy chain (HC2) when compared to the wild-type IgG1.

[0206] In some embodiments described herein, the bispecific antibody is an IgG4 isotype and comprises a S228P substitution in the HC1 and S228P, F405L and R409K substitutions in the HC2 when compared to the wild-type IgG4.

[0207] In some embodiments described herein, the bispecific antibody is an IgG4 isotype and comprises S228P, F405L and R409K substitutions in the HC1 and a S228P substitution in the HC2 when compared to the wild-type IgG4.

[0208] In some embodiments described herein, the bispecific antibody is an IgG4 isotype and comprises S228P, F234A and L235A substitutions in the HC1 and S228P, F234A, L235A, F405L and R409K substitutions in the HC2 when compared to the wild-type IgG4.

[0209] In some embodiments described herein, the bispecific antibody is an IgG4 isotype and comprises S228P, F234A, L235A, F405L and R409K substitutions in the HC1 and a S228P, F234A and L235A substitutions in the HC2 when compared to the wild-type IgG4.

[0210] In some embodiments described herein, the bispecific antibody of the invention comprises at least one, two, three, four, five, six, seven or eight asymmetrical substitutions in the HC1 and the HC2 at residue positions 350, 366, 368, 370, 399, 405, 407 or 409, when residue numbering is according to the EU index.

[0211] In some embodiments described herein, the bispecific antibody of the invention comprises at least one, two, three or four asymmetrical substitutions in the HC1 and the HC2 at residue positions 350, 370, 405 or 409, when residue numbering is according to the EU index.

[0212] In some embodiments described herein, the bispecific antibody of the invention comprises at least one asymmetrical substitution in the HC1 and the HC2 at residue positions 405 or 409, when residue numbering is according to the EU index.

[0213] Substitutions are typically made at the DNA level to a molecule such as the constant domain of the antibody using standard methods.

[0214] The antibodies of the invention may be engineered into various well-known antibody forms.

[0215] In some embodiments, the bispecific antibody of the present invention is a cross-body.

[0216] In some embodiments, the bispecific antibodies of the invention include recombinant IgG-like dual targeting molecules, wherein the two sides of the molecule each contain the Fab fragment or part of the Fab fragment of at least two different antibodies; IgG fusion molecules, wherein full length IgG antibodies are fused to an extra Fab fragment or parts of Fab fragment; Fc fusion molecules, wherein single chain Fv molecules or stabilized diabodies are fused to heavy-chain constant-domains, Fc-regions or parts thereof; Fab fusion molecules, wherein different Fab-fragments are fused together; ScFv- and diabody-based and heavy chain antibodies (e.g., domain antibodies, nanobodies) wherein different single chain Fv molecules or different diabodies or different heavy-chain antibodies (e.g. domain antibodies, nanobodies) are fused to each other or to another protein or carrier molecule.

[0217] In some embodiments, recombinant IgG-like dual targeting molecules include Dual Targeting (DT)-Ig (GSK/Domantis), Two-in-one Antibody (Genentech) and mAb2 (F-Star).

[0218] In some embodiments, IgG fusion molecules include Dual Variable Domain (DVD)-Ig (Abbott), Ts2Ab (Medlmmune/AZ) and BsAb (Zymogenetics), HERCULES (Biogen Idec) and TvAb (Roche).

[0219] In some embodiments, Fc fusion molecules include to ScFv/Fc Fusions (Academic Institution), SCORPION (Emergent BioSolutions/Trubion, Zymogenetics/BMS) and Dual Affinity Retargeting Technology (Fc-DART) (MacroGenics).

[0220] In some embodiments, Fab fusion bispecific antibodies include F(ab)2 (Medarex/AMGEN), Dual-Action or Bis-Fab (Genentech), Dock-and-Lock (DNL) (ImmunoMedics), Bivalent Bispecific (Biotecnol) and Fab-Fv (UCB-Celltech). ScFv-, diabody-based and domain antibodies include Bispecific T Cell Engager (BITE) (Micromet), Tandem Diabody (Tandab) (Affimed), Dual Affinity Retargeting Technology (DART) (MacroGenics), Single-chain Diabody (Academic), TCR-like Antibodies (AIT, ReceptorLogics), Human Serum Albumin ScFv Fusion (Merrimack) and COMBODY (Epigen Biotech), dual targeting nanobodies (Ablynx), dual targeting heavy chain only domain antibodies. Various formats of bispecific antibodies have been described, for example in Chames and Baty (2009) Curr Opin Drug Disc Dev 12: 276 and in Nunez-Prado et al., (2015) Drug Discovery Today 20(5):588-594.

[0221] Table 2 summarizes exemplary monoclonal antibodies described herein that can be used to generate the bispecific antibodies of the invention.

TABLE 2
Exemplary monoclonal antibodies that can be used to
generate the bispecific antibodies of the invention

| | |
|---|---|
| First Domain | Second Domain |

| anti-CD3 | anti-PSMA | anti-CD33 | anti-IL1RAP |
|---|---|---|---|
| CD3B312 | PSMB87 | C33B760 | IAPB3 |
| CD3B313 | PSMB119 | C33B777 | IAPB9 |
| CD3B314 | PSMB120 | C33B778 | IAPB17 |
| CD3B315 | PSMB121 | C33B782 | IAPB23 |
| CD3B316 | PSMB122 | C33B792 | IAPB25 |
| CD3B317 | PSMB123 | C33B799 | IAPB29 |
| CD3B337 | PSMB124 | C33B806 | IAPB38 |
| CD3B373 | PSMB126 | C33B830 | IAPB47 |
| CD3B376 | PSMB127 | C33B836 | IAPB55 |
| CD3B389 | PSMB129 | C33B903 | IAPB57 |
| CD3B450 | PSMB130 | C33B904 | IAPB61 |
| CD3B467 | PSMB344 | C33B905 | IAPB62 |
| | PSMB345 | C33B907 | IAPB63 |
| | PSMB346 | C33B908 | IAPB64 |
| | PSMB347 | | IAPB65 |
| | PSMB349 | | |
| | PSMB358 | | |
| | PSMB359 | | |
| | PSMB360 | | |
| | PSMB361 | | |
| | PSMB362 | | |
| | PSMB363 | | |
| | PSMB365 | | |

[0222] Exemplary anti-TMEFF2 antibodies that may be used to engineer bispecific TMEFF2×CD3 molecules are those described herein, which may comprise heavy and light chain variable region sequences including but not limited to the heavy and light chain variable region sequences provided in Tables 59, 66-68.

[0223] In some embodiments, the anti-CD3 antibody is a multispecific antibody, for example a bispecific antibody comprising a first domain that specifically binds CD3 and a second domain that specifically binds a second antigen. In some embodiments, the second, or target, antigen is a cell surface antigen that is expressed on a target cell other than an immune effector cell. In some embodiments, the second antigen is a TAA. Exemplary TAAs are PSMA, CD33, TMEFF2, and IL1RAP.

[0224] The invention provides a bispecific antibody comprising a first domain that specifically binds CD3 and a second domain that specifically binds a second antigen.

[0225] In some embodiments, the first domain comprises the HCDR1, the HCDR2, the HCDR3, the LCDR1, the LCDR2, and the LCDR3 of SEQ ID NOs:662, 663, 664, 671, 673, and 690, respectively. In some embodiments, the first domain comprises the VH and VL of SEQ ID NOs: 652 and 661, respectively. In some embodiments, the first domain comprises the HC and LC of SEQ ID NOs: 640 and 676, respectively. In some embodiments, the first domain comprises the VH and VL of SEQ ID NOs: 657 and 678, respectively. In some embodiments, the first domain comprises the HC and LC of SEQ ID NOs: 675 and 677, respectively.

[0226] In some embodiments, the first domain comprises the HCDR1, the HCDR2, the HCDR3, the LCDR1, the LCDR2, and the LCDR3 of SEQ ID NOs:662, 663, 664, 773, 673, and 690, respectively. In some embodiments, the first domain comprises the VH and VL of SEQ ID NOs:657 and 678, respectively. In some embodiments, the first domain comprises the HC and LC of SEQ ID NOs:675 and 677, respectively.

[0227] The invention also provides the bispecific antibody comprising a first domain that specifically binds CD3 and a second domain that specifically binds a second antigen of the invention for use in therapy.

[0228] The invention also provides the bispecific antibody comprising a first domain that specifically binds CD3 and a second domain that specifically binds a second antigen of the invention for use in treating a cell proliferative disorder.

[0229] The invention also provides the bispecific antibody comprising a first domain that specifically binds CD3 and a second domain that specifically binds a second antigen of the invention for use in treating cancer.

[0230] The invention also provides the bispecific antibody comprising a first domain that specifically binds CD3 and a second domain that specifically binds a second antigen of the invention for use in treating an autoimmune disease.

[0231] The invention also provides the bispecific antibody comprising a first domain that specifically binds CD3 and a second domain that specifically binds a second antigen of the invention for use in the manufacture of a medicament for treating cancer.

[0232] The invention also provides the bispecific antibody comprising a first domain that specifically binds CD3 and a second domain that specifically binds a second antigen of the invention for use in the manufacture of a medicament for treating an autoimmune disorder.

[0233] A further aspect of the invention is a method of treating a cell proliferative disorder or an autoimmune disorder in a subject in need thereof, the method comprising administering to the subject a therapeutically effective amount of the anti-CD3 antibody of the invention. In some embodiments, the anti-CD3 antibody or the bispecific antibody comprising a first domain that specifically binds CD3 and a second domain that specifically binds a second antigen of the invention is administered to the subject in a dosage of about 0.01 mg/kg to about 10 mg/kg. In some embodiments, the anti-CD3 antibody or the bispecific antibody comprising a first domain that specifically binds CD3 and a second domain that specifically binds a second antigen of the invention is administered to the subject in a dosage of about 0.1 mg/kg to about 10 mg/kg. In some embodiments, the anti-CD3 antibody or the bispecific antibody comprising a first domain that specifically binds CD3 and a second domain that specifically binds a second antigen of the invention is administered to the subject in a dosage of about 1 mg/kg. In some embodiments, the anti-CD3 antibody or the bispecific antibody comprising a first domain that specifically binds CD3 and a second domain that specifically binds a second antigen of the invention is administered subcutaneously, intravenously, intramuscularly, topically, orally, transdermally, intraperitoneally, intraorbitally, by implantation, by inhalation, intrathecally, intraventricularly, or intranasally. In some embodiments, the anti-CD3 antibody or the bispecific antibody comprising a first domain that specifically binds CD3 and a second domain that specifically binds a second antigen of the invention is administered subcutaneously. In some embodiments, the anti-CD3 antibody or the bispecific antibody comprising a first domain that specifically binds CD3 and a second domain that specifically binds a second antigen of the invention is administered intravenously.

[0234] In any of the preceding uses or methods, the cell proliferative disorder is cancer. In some embodiments, the cancer is selected from the group consisting of esophageal cancer, stomach cancer, small intestine cancer, large intestine cancer, colorectal cancer, breast cancer, non-small cell lung cancer, non-Hodgkin's lymphoma (NHL), B cell lymphoma, B cell leukemia, multiple myeloma, renal cancer, prostate cancer, liver cancer, head and neck cancer, melanoma, ovarian cancer, mesothelioma, glioblastoma, germinal-center B-cell-like (GCB) DLBCL, activated B-cell-like (ABC) DLBCL, follicular lymphoma (FL), mantle cell lymphoma (MCL), acute myeloid leukemia (AML), chronic lymphoid leukemia (CLL), marginal zone lymphoma (MZL), small lymphocytic leukemia (SLL), lymphoplasmacytic lymphoma (LL), Waldenstrom macroglobulinemia (WM), central nervous system lymphoma (CNSL), Burkitt's lymphoma (BL), B-cell prolymphocytic leukemia, Splenic marginal zone lymphoma, Hairy cell leukemia, Splenic lymphoma/leukemia, unclassifiable, Splenic diffuse red pulp small B-cell lymphoma, Hairy cell leukemia variant, Waldenstrom macroglobulinemia, Heavy chain diseases, Plasma cell myeloma, Solitary plasmacytoma of bone, Extraosseous plasmacytoma, Extranodal marginal zone lymphoma of mucosa-associated lymphoid tissue (MALT lymphoma), Nodal marginal zone lymphoma, Pediatric nodal marginal zone lymphoma, Pediatric follicular lymphoma, Primary cutaneous follicle centre lymphoma, T-cell/histiocyte rich large B-cell lymphoma, Primary DLBCL of the CNS, Primary cutaneous DLBCL, leg type, EBV-positive DLBCL of the elderly, DLBCL associated with chronic inflammation, Lymphomatoid granulomatosis, Primary mediastinal (thymic) large B-cell lymphoma. Intravascular large B-cell lymphoma, ALK-positive large B-cell lymphoma, Plasmablastic lymphoma, Large B-cell lymphoma arising in HHV8-associated multicentric Castleman disease, Primary effusion lymphoma: B-cell lymphoma, unclassifiable, with features intermediate between diffuse large B-cell lymphoma and Burkitt lymphoma, and B-cell lymphoma, unclassifiable, with features intermediate between diffuse large B-cell lymphoma, classical Hodgkin lymphoma and light chain amyloidosis.

[0235] In some embodiments, the cancer is esophageal cancer. In some embodiments, the cancer is an adenocarcinoma, for example, a metastatic adenocarcinoma (e.g., a colorectal adenocarcinoma, a gastric adenocarcinoma, or a pancreatic adenocarcinoma).

[0236] In any of the preceding uses or methods, the autoimmune disorder can be selected from the group consisting of rheumatoid arthritis, juvenile rheumatoid arthritis, systemic lupus erythematosus (SLE), Wegener's disease, inflammatory bowel disease, idiopathic thrombocytopenic purpura (ITP), thrombotic thrombocytopenic purpura (TTP), autoimmune thrombocytopenia, multiple sclerosis, psoriasis, IgA nephropathy, IgM polyneuropathies, myasthenia gravis, vasculitis, diabetes mellitus, Reynaud's syndrome, Sjorgen's syndrome, glomerulonephritis, Neuromyelitis Optica (NMO), and IgG neuropathy.

[0237] In another aspect, the invention features a kit comprising: (a) a composition comprising any one of the preceding anti-CD3 antibodies or the bispecific antibodies comprising a first domain that specifically binds CD3 and a second domain that specifically binds a second antigen of the invention and (b) a package insert comprising instructions for administering the composition to a subject to treat or delay progression of a cell proliferative disorder. The term “package insert” is used to refer to instructions customarily included in commercial packages of therapeutic products, that contain information about the indications, usage, dosage, administration, combination therapy, contraindications and/or warnings concerning the use of such therapeutic products.

[0238] In any of the preceding uses or methods, the subject can be a human.

[0239] Polynucleotides, Vectors, and Host Cells

[0240] Also disclosed are isolated polynucleotides that encode the anti-CD3 antibodies of the invention or the bispecific antibodies comprising a first domain that specifically binds CD3 and a second domain that specifically binds a second antigen of the invention. The isolated polynucleotides capable of encoding the variable domains provided herein may be included on the same, or different, vectors to produce antibodies or antigen-binding fragments of the invention.

[0241] In some embodiments, the polynucleotides of the invention include a polynucleotide encoding a leader sequence. Any leader sequence known in the art may be employed. The polynucleotide encoding the leader sequence may include, a restriction endonuclease cleavage site or a translation initiation site.

[0242] Also provided are vectors comprising the polynucleotides of the invention. The vectors can be expression vectors. The expression vector may contain one or more additional sequences such as but not limited to regulatory sequences (e.g., promoter, enhancer), a selection marker, and a polyadenylation signal. Vectors for transforming a wide variety of host cells are well known and include, but are not limited to, plasmids, phagemids, cosmids, baculoviruses, bacmids, bacterial artificial chromosomes (BACs), yeast artificial chromosomes (YACs), as well as other bacterial, yeast and viral vectors.

[0243] Recombinant expression vectors within the scope of the description include synthetic, or cDNA-derived nucleic acid fragments that encode at least one recombinant protein which may be operably linked to suitable regulatory elements. Such regulatory elements may include a transcriptional promoter, sequences encoding suitable mRNA ribosomal binding sites, and sequences that control the termination of transcription and translation. Expression vectors, especially mammalian expression vectors, may also include one or more nontranscribed elements such as an origin of replication, a suitable promoter and enhancer linked to the gene to be expressed, other 5′ or 3′ flanking nontranscribed sequences, 5′ or 3′ nontranslated sequences (such as necessary ribosome binding sites), a polyadenylation site, splice donor and acceptor sites, or transcriptional termination sequences. An origin of replication that confers the ability to replicate in a host may also be incorporated.

[0244] The transcriptional and translational control sequences in expression vectors to be used in transforming vertebrate cells may be provided by viral sources. Exemplary vectors may be constructed as described by Okayama and Berg, 3 Mol. Cell. Biol. 280 (1983).

[0245] In some embodiments, the antibody- or antigen-binding fragment-coding sequence is placed under control of a powerful constitutive promoter, such as the promoters for the following genes: hypoxanthine phosphoribosyl transferase (HPRT), adenosine deaminase, pyruvate kinase, beta-actin, human myosin, human hemoglobin, human muscle creatine, and others. In addition, many viral promoters function constitutively in eukaryotic cells and are suitable for use with the described embodiments. Such viral promoters include without limitation, Cytomegalovirus (CMV) immediate early promoter, the early and late promoters of SV40, the Mouse Mammary Tumor Virus (MMTV) promoter, the long terminal repeats (LTRs) of Maloney leukemia virus, Human Immunodeficiency Virus (HIV), Epstein Barr Virus (EBV), Rous Sarcoma Virus (RSV), and other retroviruses, and the thymidine kinase promoter of Herpes Simplex Virus. In one embodiment, the PSMA-specific antibody or antigen-binding fragment thereof coding sequence is placed under control of an inducible promoter such as the metallothionein promoter, tetracycline-inducible promoter, doxycycline-inducible promoter, promoters that contain one or more interferon-stimulated response elements (ISRE) such as protein kinase R 2′,5′-oligoadenylate synthetases, Mx genes, ADAR1, and the like.

[0246] Vectors described herein may contain one or more Internal Ribosome Entry Site(s) (IRES). Inclusion of an IRES sequence into fusion vectors may be beneficial for enhancing expression of some proteins. In some embodiments the vector system will include one or more polyadenylation sites (e.g., SV40), which may be upstream or downstream of any of the aforementioned nucleic acid sequences. Vector components may be contiguously linked, or arranged in a manner that provides optimal spacing for expressing the gene products (i.e., by the introduction of “spacer” nucleotides between the ORFs), or positioned in another way. Regulatory elements, such as the IRES motif, may also be arranged to provide optimal spacing for expression.

[0247] The vectors may comprise selection markers, which are well known in the art. Selection markers include positive and negative selection markers, for example, antibiotic resistance genes (e.g., neomycin resistance gene, a hygromycin resistance gene, a kanamycin resistance gene, a tetracycline resistance gene, a penicillin resistance gene), glutamate synthase genes, HSV-TK, HSV-TK derivatives for ganciclovir selection, or bacterial purine nucleoside phosphorylase gene for 6-methylpurine selection (Gadi et al., 7 Gene Ther. 1738-1743 (2000)). A nucleic acid sequence encoding a selection marker or the cloning site may be upstream or downstream of a nucleic acid sequence encoding a polypeptide of interest or cloning site.

[0248] The vectors described herein may be used to transform various cells with the genes encoding the described antibodies or antigen-binding fragments. For example, the vectors may be used to generate anti-CD3, anti-PSMA, anti-CD33, anti-TMEFF2, or anti-IL1RAP antibodies or antigen-binding fragment-producing cells. Thus, the invention also provides a host cell comprising the vectors of the invention.

[0249] Numerous techniques are known in the art for the introduction of foreign genes into cells and may be used to construct the recombinant cells for purposes of carrying out the described methods, in accordance with the various embodiments described and exemplified herein. The technique used should provide for the stable transfer of the heterologous gene sequence to the host cell, such that the heterologous gene sequence is heritable and expressible by the cell progeny, and so that the necessary development and physiological functions of the recipient cells are not disrupted. Techniques which may be used include but are not limited to chromosome transfer (e.g., cell fusion, chromosome mediated gene transfer, micro cell mediated gene transfer), physical methods (e.g., transfection, spheroplast fusion, microinjection, electroporation, liposome carrier), viral vector transfer (e.g., recombinant DNA viruses, recombinant RNA viruses) and the like (described in Cline, 29 Pharmac. Ther. 69-92 (1985)). Calcium phosphate precipitation and polyethylene glycol (PEG)-induced fusion of bacterial protoplasts with mammalian cells may also be used to transform cells.

[0250] Cells suitable for use in the expression of the antibodies or antigen-binding fragments described herein are preferably eukaryotic cells, more preferably cells of plant, rodent, or human origin, for example but not limited to NSO, CHO, CHOK1, perC.6, Tk-ts13, BHK, HEK293 cells, COS-7, T98G, CV-1/EBNA, L cells, C127, 3T3, HeLa, NS1, Sp2/0 myeloma cells, and BHK cell lines, among others. In addition, expression of antibodies may be accomplished using hybridoma cells. Methods for producing hybridomas are well established in the art.

[0251] Cells transformed with expression vectors of the invention may be selected or screened for recombinant expression of the antibodies or antigen-binding fragments of the invention. Recombinant-positive cells are expanded and screened for subclones exhibiting a desired phenotype, such as high level expression, enhanced growth properties, or the ability to yield proteins with desired biochemical characteristics, for example, due to protein modification or altered post-translational modifications. These phenotypes may be due to inherent properties of a given subclone or to mutation. Mutations may be effected through the use of chemicals, UV-wavelength light, radiation, viruses, insertional mutagens, inhibition of DNA mismatch repair, or a combination of such methods.

[0252] Pharmaceutical Compositions/Administration

[0253] The invention also provides for pharmaceutical compositions comprising the antibodies of the invention and a pharmaceutically acceptable carrier. For therapeutic use, the antibodies of the invention may be prepared as pharmaceutical compositions containing an effective amount of the antibody as an active ingredient in a pharmaceutically acceptable carrier. “Carrier” refers to a diluent, adjuvant, excipient, or vehicle with which the antibody of the invention is administered. Such vehicles may be liquids, such as water and oils, including those of petroleum, animal, vegetable or synthetic origin, such as peanut oil, soybean oil, mineral oil, sesame oil and the like. For example, 0.4% saline and 0.3% glycine may be used. These solutions are sterile and generally free of particulate matter. They may be sterilized by conventional, well-known sterilization techniques (e.g., filtration). The compositions may contain pharmaceutically acceptable auxiliary substances as required to approximate physiological conditions such as pH adjusting and buffering agents, stabilizing, thickening, lubricating and coloring agents, etc. The concentration of the antibodies of the invention in such pharmaceutical formulation may vary, from less than about 0.5%, usually to at least about 1% to as much as 15 or 20% by weight and may be selected primarily based on required dose, fluid volumes, viscosities, etc., according to the particular mode of administration selected. Suitable vehicles and formulations, inclusive of other human proteins, e.g., human serum albumin, are described, for example, in e.g. Remington: The Science and Practice of Pharmacy, 21st Edition, Troy, D. B. ed., Lipincott Williams and Wilkins, Philadelphia, Pa. 2006, Part 5, Pharmaceutical Manufacturing pp 691-1092, See especially pp. 958-989.

[0254] The mode of administration for therapeutic use of the antibodies of the invention may be any suitable route that delivers the antibody to the host, such as parenteral administration, e.g., intradermal, intramuscular, intraperitoneal, intravenous or subcutaneous, pulmonary, transmucosal (oral, intranasal, intravaginal, rectal), using a formulation in a tablet, capsule, solution, powder, gel, particle; and contained in a syringe, an implanted device, osmotic pump, cartridge, micropump; or other means appreciated by the skilled artisan, as well known in the art. Site specific administration may be achieved by for example intratumoral, intrarticular, intrabronchial, intraabdominal, intracapsular, intracartilaginous, intracavitary, intracelial, intracerebellar, intracerebroventricular, intracolic, intracervical, intragastric, intrahepatic, intracardial, intraosteal, intrapelvic, intrapericardiac, intraperitoneal, intrapleural, intraprostatic, intrapulmonary, intrarectal, intrarenal, intraretinal, intraspinal, intrasynovial, intrathoracic, intrauterine, intravascular, intravesical, intralesional, vaginal, rectal, buccal, sublingual, intranasal, or transdermal delivery.

[0255] The antibodies of the invention may be administered to a subject by any suitable route, for example parentally by intravenous (i.v.) infusion or bolus injection, intramuscularly or subcutaneously or intraperitoneally. i.v. infusion may be given over for example 15, 30, 60, 90, 120, 180, or 240 minutes, or from 1, 2, 3, 4, 5, 6, 7, 8, 9, 10, 11 or 12 hours.

[0256] The dose given to a subject is sufficient to alleviate or at least partially arrest the disease being treated (“therapeutically effective amount”) and may be sometimes 0.005 mg to about 100 mg/kg, e.g. about 0.05 mg to about 30 mg/kg or about 5 mg to about 25 mg/kg, or about 4 mg/kg, about 8 mg/kg, about 16 mg/kg or about 24 mg/kg, or for example about 1, 2, 3, 4, 5, 6, 7, 8, 9 or 10 mg/kg, but may even higher, for example about 15, 16, 17, 18, 19, 20, 21, 22, 23, 24, 25, 30, 40, 50, 60, 70, 80, 90 or 100 mg/kg.

[0257] A fixed unit dose may also be given, for example, 50, 100, 200, 500 or 1000 mg, or the dose may be based on the patient's surface area, e.g., 500, 400, 300, 250, 200, or 100 mg/m2. Usually between 1 and 8 doses, (e.g., 1, 2, 3, 4, 5, 6, 7 or 8) may be administered to treat the patient, but 9, 10, 11, 12, 13, 14, 15, 16, 17, 18, 19, 20 or more doses may be given.

[0258] The administration of the antibodies of the invention may be repeated after one day, two days, three days, four days, five days, six days, one week, two weeks, three weeks, one month, five weeks, six weeks, seven weeks, two months, three months, four months, five months, six months or longer. Repeated courses of treatment are also possible, as is chronic administration. The repeated administration may be at the same dose or at a different dose. For example, the antibodies of the invention described herein may be administered at 8 mg/kg or at 16 mg/kg at weekly interval for 8 weeks, followed by administration at 8 mg/kg or at 16 mg/kg every two weeks for an additional 16 weeks, followed by administration at 8 mg/kg or at 16 mg/kg every four weeks by intravenous infusion.

[0259] For example, the antibodies in the methods described herein, may be provided as a daily dosage in an amount of about 0.1-100 mg/kg, such as 0.5, 0.9, 1.0, 1.1, 1.5, 2, 3, 4, 5, 6, 7, 8, 9, 10, 11, 12, 13, 14, 15, 16, 17, 18, 19, 20, 21, 22, 23, 24, 25, 26, 27, 28, 29, 30, 40, 45, 50, 60, 70, 80, 90 or 100 mg/kg, per day, on at least one of day 1, 2, 3, 4, 5, 6, 7, 8, 9, 10, 11, 12, 13, 14, 15, 16, 17, 18, 19, 20, 21, 22, 23, 24, 25, 26, 27, 28, 29, 30, 31, 32, 33, 34, 35, 36, 37, 38, 39, or 40, or alternatively, at least one of week 1, 2, 3, 4, 5, 6, 7, 8, 9, 10, 11, 12, 13, 14, 15, 16, 17, 18, 19 or 20 after initiation of treatment, or any combination thereof, using single or divided doses of every 24, 12, 8, 6, 4, or 2 hours, or any combination thereof.

[0260] The antibodies in the methods described herein may also be administered prophylactically in order to reduce the risk of developing cancer, delay the onset of the occurrence of an event in cancer progression, and/or reduce the risk of recurrence when a cancer is in remission.

[0261] The antibodies provided herein may be lyophilized for storage and reconstituted in a suitable carrier prior to use. This technique has been shown to be effective with conventional protein preparations and well-known lyophilization and reconstitution techniques can be employed.

[0262] Methods of Detecting CD3, PSMA, CD33, IL1RAP, TMEFF2 or Target Antigen and CD3

[0263] Provided herein are methods of detecting CD3, PSMA, CD33, TMEFF2, or IL1RAP in a sample, comprising obtaining the sample, contacting the sample with the anti-CD3, the anti-PSMA, the anti-CD33, anti-TMEFF2, or the anti-IL1RAP antibody of the invention and detecting the antibody bound to CD3, PSMA, CD33, TMEFF2, or IL1RAP in the sample.

[0264] Further provided are methods of detecting CD3 and the second antigen (for example PSMA, CD33, TMEFF2 or IL1RAP) in a sample, comprising obtaining the sample, contacting the sample with the bispecific antibody comprising a first domain that specifically binds CD3 and a second domain that specifically binds a second antigen, and detecting the antibody bound to CD3 and the second antigen in the sample.

[0265] In some embodiments described herein, the sample may be derived from urine, blood, serum, plasma, saliva, ascites, circulating cells, circulating tumor cells, cells that are not tissue associated (i.e., free cells), tissues (e.g., surgically resected tumor tissue, biopsies, including fine needle aspiration), histological preparations, and the like.

[0266] The antibodies of the invention may be detected using known methods. Exemplary methods include direct labeling of the antibodies using fluorescent or chemiluminescent labels, or radiolabels, or attaching to the antibodies of the invention a moiety which is readily detectable, such as biotin, enzymes or epitope tags. Exemplary labels and moieties are ruthenium, ¹¹¹In-DOTA, ¹¹¹In-diethylenetriaminepentaacetic acid (DTPA), horseradish peroxidase, alkaline phosphatase and beta-galactosidase, poly-histidine (HIS tag), acridine dyes, cyanine dyes, fluorone dyes, oxazin dyes, phenanthridine dyes, rhodamine dyes and Alexafluor® dyes.

[0267] The antibodies provided herein may be used in a variety of assays to detect CD3, PSMA, CD33, IL1RAP, TMEFF2 or CD3 and the second antigenin the sample. Exemplary assays are western blot analysis, radioimmunoassay, surface plasmon resonance, immunoprecipitation, equilibrium dialysis, immunodiffusion, electrochemiluminescence (ECL) immunoassay, immunohistochemistry, fluorescence-activated cell sorting (FACS) or ELISA assay.

[0268] Antibody Kits

[0269] The invention also provides a kit comprising one or more of the anti-CD3, the anti-PSMA, the anti-CD33, anti-TMEFF2 or the anti-IL1RAP antibodies or the bispecific antibodies comprising a first domain that specifically binds CD3 and a second domain that specifically binds a second antigen of the invention or antigen-binding fragments thereof. The described kits may be used to carry out the methods of using the anti-CD3, the anti-PSMA, the anti-CD33, anti-TMEFF2 or the anti-IL1RAP antibodies or the bispecific antibodies comprising a first domain that specifically binds CD3 and a second domain that specifically binds a second antigen of the invention or other methods known to those skilled in the art. In some embodiments the described kits may include the antibodies or antigen-binding fragments described herein and reagents for use in detecting the presence of CD3 or the second antigen such as PSMA, CD33, IL1RAP, TMEFF2 in a biological sample Accordingly, the described kits may include one or more of the antibodies, or an antigen-binding fragment(s) thereof, described herein and a vessel for containing the antibody or fragment when not in use, instructions for use of the antibody or fragment, the antibody or fragment affixed to a solid support, and/or detectably labeled forms of the antibody or fragment, as described herein.

[0270] The invention also provides a kit comprising the herein described antibody that specifically binds PSMA. The invention also provides a kit comprising the herein described antibody specifically binding CD33. The invention also provides a kit comprising the herein described antibody specifically binding IL1RAP. The invention also provides a kit comprising the herein described antibody specifically binding TMEFF2.

[0271] The kit may be used for therapeutic uses and as diagnostic kits.

[0272] The kit may be used to detect the presence of CD3, PSMA, CD33, IL1RAP, TMEFF2 and/or the second antigen in a biological sample.

[0273] In some embodiments, the kit comprises the antibody of the invention described herein and reagents for detecting the antibody. The kit can include one or more other elements including: instructions for use; other reagents, e.g., a label, a therapeutic agent, or an agent useful for chelating, or otherwise coupling, an antibody to a label or therapeutic agent, or a radioprotective composition; devices or other materials for preparing the antibody for administration; pharmaceutically acceptable carriers; and devices or other materials for administration to a subject.

[0274] In some embodiments, the kit comprises the antibody of the invention in a container and instructions for use of the kit.

[0275] In some embodiments, the antibody in the kit is labeled.

[0276] CD3-Specific Antibodies

[0277] Described herein are isolated anti-CD3 antibodies. The anti-CD3 antibodies of the invention bind human CD3 and optionally cynomolgus CD3. In some embodiments, the anti-CD3 antibodies of the invention and fragments thereof bind to human and cynomolgus CD3 with affinities within 5-fold of each other. In other words, the difference in antibody binding is less than a multiple of 5. In this case, the anti-CD3 antibody of the invention can be used for both preclinical evaluation of safety, activity and/or pharmacokinetic profile of CD3 in primates and as a drug in humans. Put in other words, the same CD3-specific molecule can be used in preclinical animal studies as well as in clinical studies in humans. This human/cyno cross-reactivity leads to highly comparable results and a much-increased predictive power of the animal studies compared to species-specific surrogate molecules. In some embodiments, the anti-CD3 antibodies and fragments thereof of the invention bind an epitope formed by the CD3e/d subunits. The CD3-specific antibodies may be human, humanized, or chimeric. Also exemplified herein are human antibodies generated in OmniRat (Open Monoclonal Technologies (“OMT”), Palo Alto, Calif., USA, omniab.com).

[0278] In some embodiments described herein, the anti-CD3 antibody or fragment thereof has one, two, three, four or five of the following properties:
[0279] a) binds human and Macaca fascicularis CD3+ T lymphocytes with a calculated EC50 of 20 nM or less and binds Macaca fascicularis CD3-expressing HEK cells with a calculated EC50 of 40 nM or less, wherein the difference in calculated EC50 between binding CD3+ T lymphocytes and binding Macaca fascicularis CD3-expressing HEK cells is less than 5-fold, and wherein the calculated EC50 is measured in a whole cell binding assay at 0° C. using flow cytometry;
[0280] b) binds recombinant CD3d from human (SEQ ID NO:691), or binds recombinant CD3e from human (SEQ ID NO:636), or binds recombinant CD3e from Macaca fascicularis (SEQ ID NO:693) with an equilibrium dissociation constant (K_{D}) of 12 nM or less, wherein the K_{D} is measured using Proteon surface plasmon resonance assay ProteOn XPR36 system at +25° C.;
[0281] c) displays no methionine or tryptophan oxidation, or displays no asparagine deamidation, or displays no asparagine isomerization as detected by peptide mapping analysis;
[0282] d) binds residues 1-6 of CD3e as determined by X-ray crystallography; or
[0283] e) activates T cells or induces CD69 expression to a similar degree as cOKT3 or SP34-2 as determined by fluorescence-activated cell sorting assay.

[0284] The anti-CD3 antibodies and fragments thereof of the invention have an in vitro binding affinity (Kd) to human T cells expressing human CD3 that is from about 5 nM to about 1000 nM, preferably from about 5 nM to about 50 nM, from about 50 nM to about 100 nM, from about 100 nM to about 200 nM, from about 200 nM to about 300 nM, from about 300 nM to about 400 nM, from about 400 nM to about 500 nM, from about 500 nM to about 600 nM, from about 600 nM to about 700 nM, from about 700 nM to about 800 nM, from about 800 nM to about 900 nM, and from about 900 nM to about 1000 nM, more preferably from about 5 nM to about 300 nM, as determined by flow cytometry.

[0285] In some aspects, the anti-CD3 antibodies and fragments thereof of the invention are bivalent antibodies having an in vitro binding affinity (Kd) to human T cells expressing human CD3 that is from about 5 nM to about 1000 nM preferably from about 5 nM to about 50 nM, from about 50 nM to about 100 nM, from about 100 nM to about 200 nM, from about 200 nM to about 300 nM, from about 300 nM to about 400 nM, from about 400 nM to about 500 nM, from about 500 nM to about 600 nM, from about 600 nM to about 700 nM, from about 700 nM to about 800 nM, from about 800 nM to about 900 nM, and from about 900 nM to about 1000 nM, more preferably from about 5 nM to about 300 nM, most preferably about 100 nM, as determined by flow cytometry.

[0286] In some aspects, the anti-CD3 antibodies and fragments thereof of the invention are monovalent constructs having an in vitro binding affinity (Kd) to human T cells expressing human CD3 that is from about 5 nM to about 1000 nM preferably from about 5 nM to about 50 nM, from about 50 nM to about 100 nM, from about 100 nM to about 200 nM, from about 200 nM to about 300 nM, from about 300 nM to about 400 nM, from about 400 nM to about 500 nM, from about 500 nM to about 600 nM, from about 600 nM to about 700 nM, from about 700 nM to about 800 nM, from about 800 nM to about 900 nM, and from about 900 nM to about 1000 nM, more preferably from about 100 nM to about 250 nM, most preferably about 250 nM, as determined by flow cytometry.

[0287] In one aspect, the anti-CD3 antibodies and fragments thereof described herein compete with commercial CD3 antibody SP34-2 (BD Biosciences 551916) for binding of CD3, as determined by a competition binding assay using an AlexaFluor 488-conjugated SP34-2 antibody on primary human T cells measured using flow cytometry.

[0288] In one aspect, the anti-CD3 antibodies and fragments thereof exhibit no post-translational modification, including no oxidation, no deamidation, and no aspartate isomerization, as determined by peptide mapping.

[0289] In one aspect, the anti-CD3 antibodies and fragments thereof are effective in activating T cells and inducing CD69 expression to a similar degree as SP34-2 in human and cynomolgus monkey T cells and cOKT3 in human T cells, as determined by a T cell based assay using flow cytometry.

[0290] In one aspect, the anti-CD3 antibodies and fragments thereof described herein have a total enthalpy of unfolding of about 400 kcal/mol or more, about 410 kcal/mol or more, about 420 kcal/mol or more, about 430 kcal/mol or more, about 440 kcal/mol or more, about 45 kcal/mol or more, about 460 kcal/mol or more, about 470 kcal/mol or more, about 480 kcal/mol or more, about 490 kcal/mol or more, about 500 kcal/mol or more, about 510 kcal/mol or more, about 520 kcal/mol or more, about 530 kcal/mol or more, about 540 kcal/mol or more, or about 550 kcal/mol or more. In certain aspects, the anti-CD3 antibodies and fragments thereof of the invention have a total enthalpy of unfolding of about 418 kcal/mol, 545 kcal/mol, about 402 kcal/mol, or about 406 kcal/mol, and the anti-CD3 antibodies are CD3B376 (IgG4 PAA), CD3B450 (IgG4 PAA), CD3B389 (IgG1sigma), and CD3B467 (IgG1sigma) molecules, respectively.

[0291] Exemplary such antibodies include CD3B311, CD3B312, CD3B313, CD3B314, CD3B315, CD3B316, CD3B317, CD3B334, CD3B376 CD3B389, CD3B450 and CD3B467, and CD3B376 and CD3B450 engineered into a monovalent format

[0292] The anti-CD3 antibodies or antigen-binding fragments of the invention can occur in a variety of forms, but will include one or more of the antibody variable domain segments or CDRs shown in Table 7A and engineered variants thereof, for example, those shown or described in Table 9 and Table 10, and the accompanying descriptions thereof.

[0293] The invention also provides an anti-CD3 antibody, or an antigen-binding fragment thereof, comprising a heavy chain comprising a HCDR1, a HCDR2, and a HCDR3 of any one of the antibodies described in Table 7B. The invention also provides an anti-CD3 antibody or an antigen-binding fragment thereof, comprising a heavy chain comprising a HCDR1, a HCDR2, and a HCDR3 of any one of the antibodies described in Table 7B and a light chain comprising a LCDR1, a LCDR2, and a LCDR3 of any one of the antibodies described in Table 7B. In some embodiments, the anti-CD3 antibody or an antigen-binding fragment thereof of the invention competes for binding to CD3 with an antibody or antigen-binding fragment thereof comprising a heavy chain comprising a HCDR1, a HCDR2, and a HCDR3 of any one of the antibodies described in Table 7B and a light chain comprising a LCDR1, a LCDR2, and a LCDR3 of any one of the antibodies described in Table 7B.

[0294] In some embodiments, the anti-CD3 antibody of an antigen-binding fragment thereof of the invention comprises the HCDR1, the HCDR2 and the HCDR3 contained within a heavy chain variable region (VH) of SEQ ID NOs:651, 652, 653, 654, 655, 687, or 656, wherein the HCDR1, the HCDR2 and the HCDR3 are defined by Chothia, Kabat, or IMGT.

[0295] In some embodiments, the anti-CD3 antibody of an antigen-binding fragment thereof of the invention comprises the LCDR1, the LCDR2 and the LCDR3 contained within a light chain variable region (VL) of SEQ ID NOs: 658, 659, 694, 660, 688, or 661, wherein the LCDR1, the LCDR2 and the LCDR3 are defined by Chothia, Kabat, or IMGT.

[0296] In some embodiments, the anti-CD3 antibody of an antigen-binding fragment thereof of the invention comprises

[0297] the HCDR1 of SEQ ID NOs: 662, 665, or 666;

[0298] the HCDR2 of SEQ ID NOs: 663, 689, or 695; and

[0299] the HCDR3 of SEQ ID NOs: 664.

[0300] In some embodiments, the anti-CD3 antibody of an antigen-binding fragment thereof of the invention comprises

[0301] the LCDR1 of SEQ ID NOs: 773, 710, 674 or 671;

[0302] the LCDR2 of SEQ ID NOs: 669 or 673; and

[0303] the LCDR3 of SEQ ID NOs: 670.

[0304] In some embodiments, the anti-CD3 antibody of an antigen-binding fragment thereof of the invention comprises

[0305] the HCDR1 of SEQ ID NOs: 662, 665, or 666;

[0306] the HCDR2 of SEQ ID NOs: 663, 689, or 695;

[0307] the HCDR3 of SEQ ID NOs: 664;

[0308] the LCDR1 of SEQ ID NOs: 773, 710, 674 or 671;

[0309] the LCDR2 of SEQ ID NOs: 669 or 673; and

[0310] the LCDR3 of SEQ ID NOs: 670.

[0311] In some embodiments, the anti-CD3 antibody of an antigen-binding fragment thereof of the invention comprises the HCDR1, the HCDR2 and the HCDR3 of

[0312] SEQ ID NOs: 662, 663, and 664, respectively;

[0313] SEQ ID NOs: 662, 695, and 664, respectively;

[0314] SEQ ID NOs: 665, 663, and 664, respectively;

[0315] SEQ ID NOs: 665, 695, and 664, respectively;

[0316] SEQ ID NOs: 662, 689, and 664, respectively;

[0317] SEQ ID NOs: 666, 663, and 664, respectively;

[0318] SEQ ID NOs: 666, 695, and 664, respectively

[0319] SEQ ID NOs: 665, 689, and 664, respectively; or

[0320] SEQ ID NOs: 666, 689, 664, respectively.

[0321] In some embodiments, the anti-CD3 antibody of an antigen-binding fragment thereof of the invention comprises the LCDR1, the LCDR2 and the LCDR3 of

[0322] SEQ ID NOs: 773, 669, and 670, respectively;

[0323] SEQ ID NOs: 773, 673, and 670, respectively;

[0324] SEQ ID NOs: 710, 673, and 670, respectively;

[0325] SEQ ID NOs: 674, 673, and 670, respectively;

[0326] SEQ ID NOs: 671, 673, and 690, respectively;

[0327] SEQ ID NOs: 773, 673, and 690, respectively;

[0328] SEQ ID NOs: 671, 669, and 670, respectively; or

[0329] SEQ ID NOs: 776, 673, and 670, respectively.

[0330] In some embodiments, the anti-CD3 antibody of an antigen-binding fragment thereof of the invention comprises the HCDR1, HCDR2, HCDR3, LCDR1, LCDR2, and LCDR3 of SEQ ID NOs: 662, 663, 664, 773, 669, and 670, respectively.

[0331] In some embodiments, the anti-CD3 antibody of an antigen-binding fragment thereof of the invention comprises the HCDR1, HCDR2, HCDR3, LCDR1, LCDR2, and LCDR3 of SEQ ID NOs: 662, 663, 664, 773, 673, and 670, respectively.

[0332] In some embodiments, the anti-CD3 antibody of an antigen-binding fragment thereof of the invention comprises the HCDR1, HCDR2, HCDR3, LCDR1, LCDR2, and LCDR3 of SEQ ID NOs: 662, 663, 664, 671, 669, and 670, respectively.

[0333] In some embodiments, the anti-CD3 antibody of an antigen-binding fragment thereof of the invention comprises the HCDR1, HCDR2, HCDR3, LCDR1, LCDR2, and LCDR3 of SEQ ID NOs: 662, 663, 664, 671, 673, and 690, respectively.

[0334] In some embodiments, the anti-CD3 antibody of an antigen-binding fragment thereof of the invention comprises the HCDR1, HCDR2, HCDR3, LCDR1, LCDR2, and LCDR3 of SEQ ID NOs: 662, 695, 664, 773, 669, and 670, respectively.

[0335] In some embodiments, the anti-CD3 antibody of an antigen-binding fragment thereof of the invention comprises the HCDR1, HCDR2, HCDR3, LCDR1, LCDR2, and LCDR3 of SEQ ID NOs: 662, 695, 664, 773, 673, and 670, respectively.

[0336] In some embodiments, the anti-CD3 antibody of an antigen-binding fragment thereof of the invention comprises the HCDR1, HCDR2, HCDR3, LCDR1, LCDR2, and LCDR3 of SEQ ID NOs: 662, 695, 664, 671, 669, and 670, respectively.

[0337] In some embodiments, the anti-CD3 antibody of an antigen-binding fragment thereof of the invention comprises the HCDR1, HCDR2, HCDR3, LCDR1, LCDR2, and LCDR3 of SEQ ID NOs: 662, 695, 664, 671, 673, and 670, respectively.

[0338] In some embodiments, the anti-CD3 antibody of an antigen-binding fragment thereof of the invention comprises the HCDR1, HCDR2, HCDR3, LCDR1, LCDR2, and LCDR3 of SEQ ID NOs: 665, 663, 664, 773, 669, and 670, respectively.

[0339] In some embodiments, the anti-CD3 antibody of an antigen-binding fragment thereof of the invention comprises the HCDR1, HCDR2, HCDR3, LCDR1, LCDR2, and LCDR3 of SEQ ID NOs: 665, 663, 664, 773, 673, and 670, respectively.

[0340] In some embodiments, the anti-CD3 antibody of an antigen-binding fragment thereof of the invention comprises the HCDR1, HCDR2, HCDR3, LCDR1, LCDR2, and LCDR3 of SEQ ID NOs: 665, 663, 664, 671, 669, and 670, respectively.

[0341] In some embodiments, the anti-CD3 antibody of an antigen-binding fragment thereof of the invention comprises the HCDR1, HCDR2, HCDR3, LCDR1, LCDR2, and LCDR3 of SEQ ID NOs: 665, 663, 664, 671, 673, and 670, respectively.

[0342] In some embodiments, the anti-CD3 antibody of an antigen-binding fragment thereof of the invention comprises the HCDR1, HCDR2, HCDR3, LCDR1, LCDR2, and LCDR3 of SEQ ID NOs: 665, 695, 664, 773, 669, and 670, respectively.

[0343] In some embodiments, the anti-CD3 antibody of an antigen-binding fragment thereof of the invention comprises the HCDR1, HCDR2, HCDR3, LCDR1, LCDR2, and LCDR3 of SEQ ID NOs: 665, 695, 664, 773, 673, and 670, respectively.

[0344] In some embodiments, the anti-CD3 antibody of an antigen-binding fragment thereof of the invention comprises the HCDR1, HCDR2, HCDR3, LCDR1, LCDR2, and LCDR3 of SEQ ID NOs: 665, 695, 664, 776, 669, and 670, respectively.

[0345] In some embodiments, the anti-CD3 antibody of an antigen-binding fragment thereof of the invention comprises the HCDR1, HCDR2, HCDR3, LCDR1, LCDR2, and LCDR3 of SEQ ID NOs: 665, 695, 664, 776, 673, and 670, respectively.

[0346] In some embodiments, the anti-CD3 antibody of an antigen-binding fragment thereof of the invention comprises the HCDR1, HCDR2, HCDR3, LCDR1, LCDR2, and LCDR3 of SEQ ID NOs: 666, 663, 664, 773, 669, and 670, respectively.

[0347] In some embodiments, the anti-CD3 antibody of an antigen-binding fragment thereof of the invention comprises the HCDR1, HCDR2, HCDR3, LCDR1, LCDR2, and LCDR3 of SEQ ID NOs: 666, 663, 664, 773, 673, and 670, respectively.

[0348] In some embodiments, the anti-CD3 antibody of an antigen-binding fragment thereof of the invention comprises the HCDR1, HCDR2, HCDR3, LCDR1, LCDR2, and LCDR3 of SEQ ID NOs: 666, 663, 664, 776, 669, and 670, respectively.

[0349] In some embodiments, the anti-CD3 antibody of an antigen-binding fragment thereof of the invention comprises the HCDR1, HCDR2, HCDR3, LCDR1, LCDR2, and LCDR3 of SEQ ID NOs: 666, 663, 664, 671, 673, and 670, respectively.

[0350] In some embodiments, the anti-CD3 antibody of an antigen-binding fragment thereof of the invention comprises the HCDR1, HCDR2, HCDR3, LCDR1, LCDR2, and LCDR3 of SEQ ID NOs: 666, 695, 664, 773, 669, and 670, respectively.

[0351] In some embodiments, the anti-CD3 antibody of an antigen-binding fragment thereof of the invention comprises the HCDR1, HCDR2, HCDR3, LCDR1, LCDR2, and LCDR3 of SEQ ID NOs: 666, 695, 664, 773, 673, and 670, respectively.

[0352] In some embodiments, the anti-CD3 antibody of an antigen-binding fragment thereof of the invention comprises the HCDR1, HCDR2, HCDR3, LCDR1, LCDR2, and LCDR3 of SEQ ID NOs: 666, 695, 664, 671, 669, and 670, respectively.

[0353] In some embodiments, the anti-CD3 antibody of an antigen-binding fragment thereof of the invention comprises the HCDR1, HCDR2, HCDR3, LCDR1, LCDR2, and LCDR3 of SEQ ID NOs: 666, 695, 664, 671, 673, and 670, respectively.

[0354] In some embodiments, the anti-CD3 antibody of an antigen-binding fragment thereof of the invention comprises the HCDR1, HCDR2, HCDR3, LCDR1, LCDR2, and LCDR3 of SEQ ID NOs: 662, 689, 664, 671, 673, and 670, respectively.

[0355] In some embodiments, the anti-CD3 antibody of an antigen-binding fragment thereof of the invention comprises the HCDR1, HCDR2, HCDR3, LCDR1, LCDR2, and LCDR3 of SEQ ID NOs: 662, 663, 664, 710, 673, and 670, respectively.

[0356] In some embodiments, the anti-CD3 antibody of an antigen-binding fragment thereof of the invention comprises the HCDR1, HCDR2, HCDR3, LCDR1, LCDR2, and LCDR3 of SEQ ID NOs: 662, 663, 664, 671, 673, and 690, respectively.

[0357] In some embodiments, the anti-CD3 antibody of an antigen-binding fragment thereof of the invention comprises the HCDR1, HCDR2, HCDR3, LCDR1, LCDR2, and LCDR3 of SEQ ID NOs: 662, 663, 664, 773, 673, and 690, respectively.

[0358] In some embodiments, the anti-CD3 antibody of an antigen-binding fragment thereof of the invention comprises a heavy chain (HC) sequence of SEQ ID NO: 709, 640, 641, 642, 643, 675, or 644 and/or a light chain (LC) sequence of SEQ ID NO: 645, 716, 649, 676, 677, or 650.

[0359] In some embodiments, the anti-CD3 antibody of an antigen-binding fragment thereof of the invention comprises a HC having a polypeptide sequence at least 85%, preferably 90%, more preferably 95% or more, such as 95%, 96%, 97%, 98%, or 99% identical to SEQ ID NO:709, 640, 641, 642, 643, 675, or 644, and a LC having a polypeptide sequence at least 85%, preferably 90%, more preferably 95% or more, such as 95%, 96%, 97%, 98%, or 99% identical to SEQ ID NO:645, 716, 649, 676, 677, or 650. In some embodiments, the anti-CD3 antibody of an antigen-binding fragment thereof of the invention comprises a HC having a polypeptide sequence at least 85%, preferably 90%, more preferably 95% or more, such as 95%, 96%, 97%, 98%, or 99% identical to SEQ ID NO: 709, 640, 641, 642, 643, 675, or 644, and a LC having a polypeptide sequence at least 85%, preferably 90%, more preferably 95% or more, such as 95%, 96%, 97%, 98%, or 99% identical to SEQ ID NO:645, 716, 649, 676, 677 or 650, wherein the variation in sequence does not occur in a CDR region.

[0360] In some embodiments, the anti-CD3 antibody of an antigen-binding fragment thereof of the invention comprises a heavy chain variable region (VH) sequence of SEQ ID NO:651, 652, 657, 653, 654, 655, 687, or 656 and/or a light chain variable region (VL) sequence of SEQ ID NO:658, 659, 694, 660, 688, 678, or 661. In some embodiments, the anti-CD3 antibody of an antigen-binding fragment thereof of the invention comprises a VH having a polypeptide sequence at least 85%, preferably 90%, more preferably 95% or more, such as 95%, 96%, 97%, 98%, or 99% identical to SEQ ID NO: 651, 652, 657, 653, 654, 655, 687, or 656, and a VL having a polypeptide sequence at least 85%, preferably 90%, more preferably 95% or more, such as 95%, 96%, 97%, 98%, or 99% identical to SEQ ID NOS 658, 659, 694, 660, 688, 678, or 661. In some embodiments, the anti-CD3 antibody of an antigen-binding fragment thereof of the invention comprises a VH having a polypeptide sequence at least 85%, preferably 90%, more preferably 95% or more, such as 95%, 96%, 97%, 98%, or 99% identical to SEQ ID NO: 651, 652, 657, 653, 654, 655, 687, or 656, and a VL having a polypeptide sequence at least 85%, preferably 90%, more preferably 95% or more, such as 95%, 96%, 97%, 98%, or 99% identical to SEQ ID NO:658, 659, 694, 660, 688, 678, or 661, wherein the variation in sequence does not occur in a CDR region.

[0361] PSMA-Specific Antibodies

[0362] The antibodies and fragments thereof that bind to PSMA bind to the chimpanzee target antigen. In one embodiment, the antibodies and fragments thereof bind to the human and macaque PSMA target antigens with affinities within 5-fold of each other. In other words, the difference in antibody binding is less than a multiple of 5. In this case, the identical antibody molecule can be used both for preclinical evaluation of safety, activity and/or pharmacokinetic profile of PSMA in primates and as a drug in humans. Put in other words, the same PSMA-specific molecule can be used in preclinical animal studies as well as in clinical studies in humans. This leads to highly comparable results and a much-increased predictive power of the animal studies compared to species-specific surrogate molecules. Since the PSMA domain is cross-species specific, i.e. reactive with the human and macaque antigens, the antibody or fragments thereof of the invention can be used both for preclinical evaluation of safety, activity and/or pharmacokinetic profile of these binding domains in primates and—in the identical form—as drug in humans.

[0363] The present invention also provides for multispecific antibodies that specifically bind to PSMA. According to the invention, a bispecific, i.e. bifunctional, antibody can be used to engage two different therapeutic targets or perform two distinct functions. Such antibodies can be used for example to recruit an immune effector cell, e.g. T- or NK-cell, towards a particular target cell. Various antibody-fragment based molecules are known and under investigation, for example for cancer therapy.

[0364] The present invention also provides for a PSMA×“effector antigen” bispecific antibody. In one embodiment, the effector antigen of the PSMA×“effector antigen” bispecific antibody is CD3. It has been found in the present invention that it is possible to generate a PSMA×CD3 bispecific antibody wherein the identical molecule can be used in preclinical animal testing, as well as clinical studies and even in therapy in human. This is due to the identification of the PSMA×CD3 bispecific antibody, which, in addition to binding to human PSMA and human CD3, respectively, also binds to the homologs of antigens of chimpanzee and macaques. The PSMA×CD3 bispecific antibody of the invention can be used as a therapeutic agent against various diseases, including, but not limited, to cancer. In view of the above, the need to construct a surrogate target PSMA×CD3 bispecific antibody for testing in a phylogenetically distant (from humans) species disappears. As a result, the identical molecule can be used in animal preclinical testing as is intended to be administered to humans in clinical testing as well as following market approval and therapeutic drug administration.

[0365] In some embodiments described herein, the isolated antibody or antibody fragment thereof specifically binding PSMA has one, two, three, four or five of the following properties:
[0366] a. binds Pan troglodytes PSMA extracellular domain (ECD) with an equilibrium dissociation constant (K_{D}) of 25 nM or less, wherein the K_{D} is measured using ProteOn XPR36 system at +25° C.,
[0367] b. binds LNCaP cells with a calculated EC50 of 20 nM or less and binds Macaca fascicularis PSMA-expressing HEK cells with a calculated EC50 of 40 nM or less, wherein the difference in calculated EC50 between binding LNCaP cells and binding Macaca fascicularis PSMA-expressing HEK cells is less than 5-fold, and wherein the calculated EC50 is measured in a whole cell binding assay at 0° C. using flow cytometry,
[0368] c. binds recombinant PSMA ECD from human (SEQ ID NO:55), Pan troglodytes (SEQ ID NO:52) and Macaca fascicularis (SEQ ID NO:53) with an equilibrium dissociation constant (K_{D}) of 12 nM or less, wherein the K_{D} is measured using Proteon surface plasmon resonance assay ProteOn XPR36 system at +25° C.;
[0369] d. displays T-cell mediated killing of LNCaP cells, C42 cells, human PSMA-expressing HEK cells or Macaca fascicularis PSMA-expressing HEK cells when paired in a bispecific antibody with anti-CD3 antibody, wherein the T-cell mediated killing is measured by Chromium-51 or by caspase 3/7 activation assay, or
[0370] e. recognizes a conformational epitope wherein the epitope is comprised of residues 1138, F235, P237, G238, D244, Y299, Y300, Q303, K304, E307, and K324-P326 of human PSMA (SEQ ID NO:51)

[0371] Exemplary such antibodies or fragments thereof are PSMA antibodies PSMB119, PSMB120, PSMB121, PSMB122, PSMB123, PSMB87, PSMB126, PSMB127, PSMB128, PSMB129, PSMB130, PSMB120, PSMB121, PSMB122, PSMB123, PSMB127, PSMB128, PSMB130, PSMB344, PSMB345, PSMB346, PSMB347, PSMB349, PSMB358, PSMB359, PSMB360, PSMB361, PSMB362, PSMB363, and PSMB365 described herein.

[0372] In some embodiments of the invention described herein, the antibody specifically binding PSMA of the invention comprises the HCDR1, the HCDR2, the HCDR3, the LCDR1, the LCDR2 and the LCDR3 of SEQ ID NOs:56, 57, 58, 59, 60, and 61, respectively.

[0373] In some embodiments of the invention described herein, the antibody specifically binding PSMA of the invention comprises the HCDR1, the HCDR2, the HCDR3, the LCDR1, the LCDR2 and the LCDR3 of SEQ ID NOs:62, 63, 64, 65, 60, and 66, respectively.

[0374] In some embodiments of the invention described herein, the antibody specifically binding PSMA of the invention comprises the HCDR1, the HCDR2, the HCDR3, the LCDR1, the LCDR2 and the LCDR3 of SEQ ID NOs:67, 68, 69, 70, 71, and 72, respectively.

[0375] In some embodiments of the invention described herein, the antibody specifically binding PSMA of the invention comprises the HCDR1, the HCDR2, the HCDR3, the LCDR1, the LCDR2 and the LCDR3 of SEQ ID NOs:73, 74, 75, 76, 60, and 61, respectively.

[0376] In some embodiments of the invention described herein, the antibody specifically binding PSMA of the invention comprises the HCDR1, the HCDR2, the HCDR3, the LCDR1, the LCDR2 and the LCDR3 of SEQ ID NOs:78, 79, 80, 81, 82, and 83, respectively.

[0377] In some embodiments of the invention described herein, the antibody specifically binding PSMA of the invention comprises the HCDR1, the HCDR2, the HCDR3, the LCDR1, the LCDR2 and the LCDR3 of SEQ ID NOs:84, 85, 86, 87, 60, and 88, respectively.

[0378] In some embodiments of the invention described herein, the antibody specifically binding PSMA of the invention comprises the HCDR1, the HCDR2, the HCDR3, the LCDR1, the LCDR2 and the LCDR3 of SEQ ID NOs:89, 90, 91, 92, 93, and 94, respectively.

[0379] In some embodiments of the invention described herein, the antibody specifically binding PSMA of the invention comprises the HCDR1, the HCDR2, the HCDR3, the LCDR1, the LCDR2 and the LCDR3 of SEQ ID NOs:95, 96, 97, 65, 60, and 66, respectively.

[0380] In some embodiments of the invention described herein, the antibody specifically binding PSMA of the invention comprises the HCDR1, the HCDR2, the HCDR3, the LCDR1, the LCDR2 and the LCDR3 of SEQ ID NOs:84, 98, 99, 100, 82, and 101, respectively.

[0381] In some embodiments of the invention described herein, the antibody specifically binding PSMA of the invention comprises the HCDR1, the HCDR2, the HCDR3, the LCDR1, the LCDR2 and the LCDR3 of SEQ ID NOs:89, 90, 102, 103, 104, and 105, respectively.

[0382] In some embodiments of the invention described herein, the antibody specifically binding PSMA of the invention comprises the HCDR1, the HCDR2, the HCDR3, the LCDR1, the LCDR2 and the LCDR3 of SEQ ID NOs:89, 90, 106, 103, 104, and 105, respectively.

[0383] In some embodiments of the invention described herein, the antibody specifically binding PSMA of the invention comprises the HCDR1, the HCDR2, the HCDR3, the LCDR1, the LCDR2 and the LCDR3 of SEQ ID NOs: 107, 108, 109, 76, 60, and 88, respectively.

[0384] In some embodiments of the invention described herein, the antibody specifically binding PSMA of the invention comprises the HCDR1, the HCDR2, the HCDR3, the LCDR1, the LCDR2 and the LCDR3 of SEQ ID NOs: 78, 1, 80, 81, 82, and 83, respectively.

[0385] In some embodiments of the invention described herein, the antibody specifically binding PSMA of the invention comprises the HCDR1, the HCDR2, the HCDR3, the LCDR1, the LCDR2 and the LCDR3 of SEQ ID NOs: 78, 1, 80, 81, 82, and 83, respectively.

[0386] In some embodiments of the invention described herein, the antibody specifically binding PSMA of the invention comprises the HCDR1, the HCDR2, the HCDR3, the LCDR1, the LCDR2 and the LCDR3 of SEQ ID NOs: 78, 1, 80, 4, 82, and 686, respectively.

[0387] In some embodiments of the invention described herein, the antibody specifically binding PSMA of the invention comprises the HCDR1, the HCDR2, the HCDR3, the LCDR1, the LCDR2 and the LCDR3 of SEQ ID NOs: 78, 1, 80, 81, 792, and 686, respectively.

[0388] In some embodiments of the invention described herein, the antibody specifically binding PSMA of the invention comprises the HCDR1, the HCDR2, the HCDR3, the LCDR1, the LCDR2 and the LCDR3 of SEQ ID NOs: 78, 2, 80, 81, 82, and 83, respectively.

[0389] In some embodiments of the invention described herein, the antibody specifically binding PSMA of the invention comprises the HCDR1, the HCDR2, the HCDR3, the LCDR1, the LCDR2 and the LCDR3 of SEQ ID NOs: 78, 3, 80, 81, 82, and 5, respectively.

[0390] In some embodiments of the invention described herein, the antibody specifically binding PSMA of the invention comprises the HCDR1, the HCDR2, the HCDR3, the LCDR1, the LCDR2 and the LCDR3 of SEQ ID NOs: 78, 3, 80, 81, 82, and 83, respectively.

[0391] In some embodiments of the invention described herein, the antibody specifically binding PSMA of the invention comprises the HCDR1, the HCDR2, the HCDR3, the LCDR1, the LCDR2 and the LCDR3 of SEQ ID NOs: 78, 3, 80, 4, 82, and 686, respectively.

[0392] In some embodiments of the invention described herein, the antibody specifically binding PSMA of the invention comprises the HCDR1, the HCDR2, the HCDR3, the LCDR1, the LCDR2 and the LCDR3 of SEQ ID NOs: 78, 3, 80, 81, 792, and 686, respectively.

[0393] In some embodiments of the invention described herein, the antibody specifically binding PSMA of the invention comprises the HCDR1, the HCDR2, the HCDR3, the LCDR1, the LCDR2 and the LCDR3 of SEQ ID NOs: 78, 2, 81, 81, 82, and 5, respectively.

[0394] In some embodiments of the invention described herein, the antibody specifically binding PSMA of the invention comprises the HCDR1, the HCDR2, the HCDR3, the LCDR1, the LCDR2 and the LCDR3 of SEQ ID NOs: 78, 2, 80, 4, 792, and 686, respectively.

[0395] In some embodiments of the invention described herein, the antibody specifically binding PSMA of the invention comprises the HCDR1, the HCDR2, the HCDR3, the LCDR1, the LCDR2 and the LCDR3 of SEQ ID NOs: 78, 2, 80, 4, 792, and 686, respectively.

[0396] In some embodiments of the invention described herein, the antibody specifically binding PSMA of the invention comprises the HCDR1, the HCDR2, the HCDR3, the LCDR1, the LCDR2 and the LCDR3 of SEQ ID NOs: 78, 683, 80, 81, 792, and 686, respectively.

[0397] In some embodiments of the invention described herein, the antibody specifically binding PSMA of the invention comprises a heavy chain variable region (VH) of SEQ ID NOs: 6, 7, 8, 110, 112, 114, 116, 118, 120, 121, 123, 125, 126, 128, 130, or 681. In some embodiments of the invention described herein, the antibody specifically binding PSMA of the invention comprises a light chain variable region (VL) of SEQ ID NOs: 9, 111, 113, 115, 117, 119, 122, 124, 127, 129, 131, or 682.

[0398] In some embodiments of the invention described herein, the antibody specifically binding PSMA of the invention comprises a heavy chain sequence of SEQ ID NOs: 12, 13, 132, 134, 136, 138, 140, 141, 143, 145, 146, 148, 150, 151, or 679.

[0399] In some embodiments of the invention described herein, the antibody specifically binding PSMA of the invention comprises a light chain sequence of SEQ ID NOs: 14, 15, 75, 133, 135, 137, 139, 142, 144, 147, 149 or 680.

[0400] CD33-Specific Antibodies

[0401] The CD33-specific antibodies of the invention possess one or more desirable functional properties, including but not limited to high-affinity binding to CD33 and/or CD3, high specificity to CD33 and/or CD3, and the ability to treat or prevent cancer when administered alone or in combination with other anti-cancer therapies.

[0402] In certain embodiments, the isolated monoclonal antibodies or antigen-binding fragments thereof bind the C2 domain of CD33. In certain embodiments, the isolated monoclonal antibodies or antigen-binding fragments thereof bind the V domain of CD33. The full length human CD33 is provided by Uniprot P20138 (SEQ ID NO:244).

[0403] As used herein, an antibody that “specifically binds to CD33” refers to an antibody that binds to a CD33, preferably a human CD33, preferably the C2 domain of CD33, with a KD of 1×10⁻⁷ M or less, preferably 1×10⁻⁸ M or less, more preferably 5×10⁻⁹ M or less, 1×10⁻⁹ M or less, 5×0-10 M or less, or 1×10⁻¹⁰ M or less.

[0404] The antibodies or antigen-binding fragments described herein can occur in a variety of forms, but will include one or more of the antibody CDRs shown in Table 39 and 40.

[0405] Described herein are recombinant antibodies and antigen-binding fragments that specifically bind to CD33. In some embodiments, the CD33-specific antibodies or antigen-binding fragments are human IgG, or derivatives thereof. While the CD33-specific antibodies or antigen-binding fragments exemplified herein are human, the antibodies or antigen-binding fragments exemplified may be chimerized.

[0406] In some embodiments are provided an CD33-specific antibody, or an antigen-binding fragment thereof, comprising a heavy chain comprising a CDR1, a CDR2, and a CDR3 of any one of the antibodies described in Table 39. In some embodiments are provided an CD33-specific antibody, or an antigen-binding fragment thereof, comprising a heavy chain comprising a CDR1, a CDR2, and a CDR3 of any one of the antibodies described in Table 39 and a light chain comprising a CDR1, a CDR2, and a CDR3 of any one of the antibodies described in Table 40.

[0407] In some embodiments are provided a CD33-specific antibody, or antigen-binding fragment thereof, comprising a heavy chain variable region shown in Table 38. In some embodiments are provided a CD33-specific antibody, or antigen-binding fragment thereof, comprising a light chain variable region shown in Table 38.

[0408] The heavy chain variable domain and light chain variable domain of antibodies discussed in this section and shown in Table 38 are suitable for inclusion in bispecific constructs. For example, in some embodiments of the CD33 bispecific antibodies, the effector arm is a CD3 arm. In some embodiments of the CD33×CD3 bispecific antibody, the CD3 arm comprises the HCDR1, the HCDR2, the HCDR3, the LCDR1, the LCDR2, and the LCDR3 of SEQ ID NOs:662, 663, 664, 671, 673, and 670, respectively. In some embodiments of the CD33×CD3 bispecific antibody, the CD3 arm comprises the VH and VL of SEQ ID NOs: 652 and 661, respectively. In some embodiments of the CD33×CD3 bispecific antibody, the CD3 arm comprises the HC and LC of SEQ ID NOs: 640 and 676, respectively.

[0409] In some embodiments of the CD33×CD3 bispecific antibody, the CD3 arm comprises the HCDR1, the HCDR2, the HCDR3, the LCDR1, the LCDR2, and the LCDR3 of SEQ ID NOs:662, 663, 664, 773, 673, and 670, respectively. In some embodiments of the CD33×CD3 bispecific antibody, the CD3 arm comprises the VH and VL of SEQ ID NOs:657 and 678, respectively. In some embodiments of the CD33×CD3 bispecific antibody, the CD3 arm comprises the HC and LC of SEQ ID NOs:675 and 677, respectively.

[0410] In certain embodiments, the anti-CD33 antibody or antigen-binding fragment thereof comprises a heavy chain variable region having a polypeptide sequence at least 95% identical to SEQ ID NO:267, 260, 275, 270, 262, 258, 257, 281, 292, 291, 261, 269, 280, 259, 263, 264, 265, 266, 272, 277, 279, 284, or 285, or a light chain variable region having a polypeptide sequence at least 95% identical to SEQ ID NO:287, 314, 309, 301, 298, 297, 290, 332, 331, 302, 310, 320, 300, 304, 305, 306, 307, 317, 319, 324, or 325; and the anti-CD3 antibody or antigen-binding fragment thereof comprises a heavy chain variable region having a polypeptide sequence at least 95% identical to SEQ ID NO:257 or 258, or a light chain variable region having a polypeptide sequence at least 95% identical to SEQ ID NO:298 or 299.

[0411] IL1RAP-Specific Antibodies

[0412] As used herein, the terms “interleukin-1 receptor accessory protein”, “IL1RAP” and “IL1-RAP” specifically include the human IL1RAP protein (SEQ ID NO:576), for example as described in GenBank Accession No. AAB84059, NCBI Reference Sequence: NP_002173.1 and UniProtKB/Swiss-Prot Accession No. Q9NPH3-1 (see also Huang et al., 1997, Proc. Natl. Acad. Sci. USA. 94 (24), 12829-12832). IL1RAP is also known in the scientific literature as IL1 R3, C3orf13, FLJ37788, IL-1 RAcP and EG3556.

[0413] The antibodies or antigen-binding fragments described herein can occur in a variety of forms, but will include one or more of the antibody CDRs shown in Table 29.

[0414] Described herein are recombinant antibodies and antigen-binding fragments that specifically bind to IL1RAP. In some embodiments, the IL1RAP-specific antibodies or antigen-binding fragments are human IgG, or derivatives thereof. While the IL1RAP-specific antibodies or antigen-binding fragments exemplified herein are human, the antibodies or antigen-binding fragments exemplified may be chimerized.

[0415] In some embodiments are provided an IL1RAP-specific antibody, or an antigen-binding fragment thereof, comprising a heavy chain comprising a CDR1, a CDR2, and a CDR3 of any one of the antibodies described in Table 29. In some embodiments are provided an IL1RAP-specific antibody, or an antigen-binding fragment thereof, comprising a heavy chain comprising a CDR1, a CDR2, and a CDR3 of any one of the antibodies described in Table 29 and a light chain comprising a CDR1, a CDR2, and a CDR3 of any one of the antibodies described in Table 29.

[0416] In some embodiments are provided a IL1RAP-specific antibody, or antigen-binding fragment thereof, comprising a heavy chain variable region of any one of the antibodies shown in Table 30. In some embodiments are provided a IL1RAP-specific antibody, or antigen-binding fragment thereof, comprising a light chain variable region of any one of the antibodies shown in Table 30. In some embodiments are provided a IL1RAP-specific antibody, or antigen-binding fragment thereof, comprising a heavy chain variable region and a light chain variable region of any one of the antibodies shown in Table 30.

[0417] The heavy chain variable domain and light chain variable domain of antibodies discussed in this section and shown in Table 30 are suitable for inclusion in bispecific constructs in which the targeting arm is an anti-IL1RAP arm. For example, in some embodiments of the IL1RAP bispecific antibodies, the effector arm is a CD3 arm. In some embodiments of the IL1RAP×CD3 bispecific antibody, the CD3 arm comprises the HCDR1, the HCDR2, the HCDR3, the LCDR1, the LCDR2, and the LCDR3 of SEQ ID NOs:662, 663, 664, 671, 673, and 670, respectively. In some embodiments of the IL1RAP×CD3 bispecific antibody, the CD3 arm comprises the VH and VL of SEQ ID NOs: 652 and 661, respectively. In some embodiments of the IL1RAP×CD3 bispecific antibody, the CD3 arm comprises the HC and LC of SEQ ID NOs: 640 and 676, respectively.

[0418] In some embodiments of the IL1RAP×CD3 bispecific antibody, the CD3 arm comprises the HCDR1, the HCDR2, the HCDR3, the LCDR1, the LCDR2, and the LCDR3 of SEQ ID NOs:662, 663, 664, 773, 673, and 670, respectively. In some embodiments of the IL1RAP×CD3 bispecific antibody, the CD3 arm comprises the VH and VL of SEQ ID NOs:657 and 678, respectively. In some embodiments of the IL1RAP×CD3 bispecific antibody, the CD3 arm comprises the HC and LC of SEQ ID NOs:675 and 677, respectively.

[0419] TMEFF2-Specific Antibodies

[0420] The invention provides an isolated anti-TMEFF2 antibody or an antigen binding fragment thereof that binds to a membrane proximal region of SEQ ID NO: 629 of TMEFF2. The anti-TMEFF2 antibodies of the invention binding the membrane proximal region of TMEFF2 are not internalized by cells. While wishing not to be bound by any particular theory, it can be expected that non-internalizing anti-TMEFF2 antibodies have improved oncogenic effect mediated by antibody effector functions resulting from lack of internalization and degradation of TMEFF2 when compared to internalizing anti-TMEFF2 antibodies.

[0421] “Binds to a membrane proximal region” means that 90% of antibody epitope residues identified using hydrogen/deuterium exchange (H/D exchange) reside within the membrane proximal region of TMEFF2. The epitope residues are those which are protected by the test antibody by at least 5% difference in deuteration levels through H/D exchange. Exemplary such antibodies are TMEB675, TMEB570, TMEB674, TMEB565, TMEB762 and TMEB757 as described herein.

[0422] In some embodiments, the isolated anti-TMEFF2 antibody or the antigen binding fragment thereof binds within residues HGKCEHSINMQEPSC (SEQ ID NO: 592) or DAGYTGQHCEKKDYSVL (SEQ ID NO: 600) to the membrane proximal region of TMEFF2. An exemplary anti-TMEFF2 antibody binding within residues HGKCEHSINMQEPSC (SEQ ID NO: 592) is TMEB570. An exemplary anti-TMEFF2 antibody binding within residues DAGYTGQHCEKKDYSVL (SEQ ID NO: 600) is TMEB675. TNEB675 variants TMEB762 and TMEB757 are also expected to bind the membrane proximal region of TMEFF2 within residues DAGYTGQHCEKKDYSVL (SEQ ID NO: 600).

[0423] In an H/D exchange assay, recombinantly expressed TMEFF2 ECD is incubated in the presence or absence of the antibody in deuterated water for predetermined times resulting in deuterium incorporation at exchangeable hydrogen atoms which are unprotected by the antibody, followed by protease digestion of the protein and analyses of the peptide fragments using LC-MS. H/D exchange assay can be performed using known protocols. An exemplary protocol is described in Example 5.

[0424] The invention also provides an isolated anti-TMEFF2 antibody or an antigen binding fragment thereof, wherein the antibody or the antigen binding fragment thereof competes for binding to the membrane proximal region of TMEFF2 with a reference antibody comprising a heavy chain variable region (VH) of SEQ ID NO: 25 and a light chain variable region (VL) of SEQ ID NO: 28, the VH of SEQ ID NO: 589 and the VL of SEQ ID NO: 29, the VH of SEQ ID NO: 27 and the VL of SEQ ID NO: 30, the VH of SEQ ID NO: 589 and the VL of SEQ ID NO: 31, the VH of SEQ ID NO: 604 and the VL of SEQ ID NO: 607, or the VH of SEQ ID NO: 612 and the VL of SEQ ID NO: 613.

[0425] Competition for binding of a test antibody to the membrane proximal region of TMEFF2 with the reference antibody may be assayed in vitro using well known methods. For example, binding of MSD Sulfo-Tag™ NHS-ester-labeled test antibody to the membrane proximal region of TMEFF2 in the presence of an unlabeled reference antibody may be assessed by ELISA, or Bioacore analyses or flow cytometry may be used to demonstrate competition. The test antibody competes for binding to TMEFF2 with the reference antibody when the test antibody inhibits binding of the reference antibody to the membrane proximal region of TMEFF2 by 85% or more, for example 90% or more, or 95% or more.

[0426] The invention also provides an isolated anti-TMEFF2 antibody or an antigen binding fragment thereof comprising a heavy chain complementarity determining region 1 (HCDR1), a HCDR2, a HCDR3, a light chain complementarity determining region 1 (LCDR1), a LCDR2 and a LCDR3 of

[0427] SEQ ID NOs: 582, 584, 587, 18, 588 and 22, respectively;

[0428] SEQ ID NOs: 583, 585, 16, 19, 21, and 23, respectively;

[0429] SEQ ID NOs: 582, 586, 17, 18, 588 and 24, respectively;

[0430] SEQ ID NOs: 583, 585, 16, 18, 588 and 22, respectively; or

[0431] SEQ ID NOs: 582, 584, 587, 18, 588 and 603, respectively.

[0432] In some embodiments, the isolated anti-TMEFF2 antibody or the antigen binding fragment thereof of the invention binds to the membrane proximal region of TMEFF2 with an equilibrium dissociation constant (K_{D}) of about 0.4×10⁻⁹ M or less, wherein the K_{D} is measured using surface plasmon resonance in acetate buffer at pH 4.5-5.0 at room temperature.

[0433] In some embodiments, the isolated anti-TMEFF2 antibody or the antigen binding fragment thereof binds to the membrane proximal region of TMEFF2 with the K_{D} of between about 0.1×10⁻¹⁰ M and about 0.4×10⁻⁹ M.

[0434] The affinity of an antibody to the membrane proximal region of TMEFF2 may be determined experimentally using any suitable method. An exemplary method utilizes ProteOn XPR36, Biacore 3000 or KinExA instrumentation, ELISA or competitive binding assays known to those skilled in the art. The measured affinity of an antibody to TMEFF2 may vary if measured under different conditions (e.g., osmolarity, pH). Thus, measurements of affinity and other binding parameters (e.g., K_{D}, Kₒₙ, and K_{off}) are typically made with standardized conditions and a standardized buffer, such as the buffer described herein. Skilled in the art will appreciate that the internal error for affinity measurements for example using Biacore 3000 or ProteOn (measured as standard deviation, SD) can typically be within 5-33% for measurements within the typical limits of detection. Therefore, the term “about” when referring to a K_{D} value reflects the typical standard deviation in the assay. For example, the typical SD for a K_{D} of 1×10⁻⁹ M is up to ±0.33×10⁻⁹ M.

[0435] The invention also provides an isolated anti-TMEFF2 antibody or an antigen binding fragment thereof that binds to the membrane proximal region of TMEFF2, comprising a heavy chain variable region (VH) framework derived from VH3_3-23 (SEQ ID NO: 53) or VH1_1-69 (SEQ ID NO: 54).

[0436] The invention also provides an isolated anti-TMEFF2 antibody or an antigen binding fragment thereof that binds to the membrane proximal region of TMEFF2, comprising a light chain variable region (VL) framework derived from VKI_L11 (SEQ ID NO: 55) or VKIIII_A27 (SEQ ID NO: 591).

[0437] The invention also provides an isolated anti-TMEFF2 antibody or an antigen binding fragment thereof that binds to the membrane proximal region of TMEFF2, comprising a VH framework and a VL framework derived from VH3_3-23 of SEQ ID NO: 53 and VKI_L11 of SEQ ID NO: 55, respectively.

[0438] The invention also provides an isolated anti-TMEFF2 antibody or an antigen binding fragment thereof that binds to the membrane proximal region of TMEFF2, comprising a VH framework and a VL framework derived from VH1_1-69 of SEQ ID NO: 54 and VKIII_A27 of SEQ ID NO: 591, respectively.

[0439] The invention also provides an isolated anti-TMEFF2 antibody or an antigen binding fragment thereof that binds to the membrane proximal region of TMEFF2, comprising a VH framework and a VL framework derived from VH1_1-69 of SEQ ID NO: 54 and VKI_L11 of SEQ ID NO: 55, respectively.

[0440] Antibodies comprising heavy or light chain variable regions “derived from” a particular framework or germline sequence refer to antibodies obtained from a system that uses human germline immunoglobulin genes, such as from transgenic mice, rats or chicken or from phage display libraries as discussed herein. An antibody containing particular framework derived from germline sequence may contain amino acid differences as compared to the sequence it was derived from, due to, for example, naturally-occurring somatic mutations or intentional substitutions.

[0441] The invention also provides an isolated anti-TMEFF2 antibody or an antigen binding fragment thereof, comprising a HCDR1, a HCDR2, a HCDR3, a LCDR1, a LCDR2 and a LCDR3 of SEQ ID NOs: 582, 584, 587, 18, 588 and 22, respectively.

[0442] In some embodiments, the isolated anti-TMEFF2 antibody or the antigen-binding fragment thereof comprises a VH of SEQ ID NO: 25 and a VL of SEQ ID NO: 28.

[0443] In some embodiments, the VH is encoded by a polynucleotide of SEQ ID NO: 39 and the VL is encoded by a polynucleotide of SEQ ID NO: 42.

[0444] In some embodiments, the isolated anti-TMEFF2 antibody or the antigen binding fragment thereof comprises a HC of SEQ ID NO: 32 and a LC of SEQ ID NO: 35.

[0445] In some embodiments, the HC is encoded by a polynucleotide of SEQ ID NO: 46 and the VL is encoded by a polynucleotide of SEQ ID NO: 49.

[0446] The invention also provides an isolated anti-TMEFF2 antibody or an antigen binding fragment thereof comprising a HCDR1, a HCDR2, a HCDR3, a LCDR1, a LCDR2 and a LCDR3 of SEQ ID NOs: 583, 585, 16, 19, 21 and 23, respectively.

[0447] In some embodiments, the isolated anti-TMEFF2 antibody or the antigen-binding fragment thereof comprises a VH of SEQ ID NO: 589 and a VL of SEQ ID NO: 29.

[0448] In some embodiments, the VH is encoded by a polynucleotide of SEQ ID NO: 40 and the VL is encoded by a polynucleotide of SEQ ID NO: 43.

[0449] In some embodiments, the isolated anti-TMEFF2 antibody or the antigen binding fragment thereof comprises a HC of SEQ ID NO: 33 and a LC of SEQ ID NO: 36.

[0450] In some embodiments, the HC is encoded by a polynucleotide of SEQ ID NO: 47 and the LC is encoded by a polynucleotide of SEQ ID NO: 50.

[0451] The invention also provides an isolated anti-TMEFF2 antibody or an antigen binding fragment thereof comprising a HCDR1, a HCDR2, a HCDR3, a LCDR1, a LCDR2 and a LCDR3 of SEQ ID NOs: 582, 586, 17, 18, 588 and 24, respectively.

[0452] In some embodiments, the isolated anti-TMEFF2 antibody or the antigen binding fragment thereof comprises a VH of SEQ ID NO: 27 and a VL of SEQ ID NO: 30.

[0453] In some embodiments, the VH is encoded by a polynucleotide of SEQ ID NO: 41 and the VL is encoded by a polynucleotide of SEQ ID NO: 44.

[0454] In some embodiments, the isolated anti-TMEFF2 antibody or the antigen binding fragment thereof comprises a HC of SEQ ID NO: 34 and a LC of SEQ ID NO: 37.

[0455] In some embodiments, the HC is encoded by a polynucleotide of SEQ ID NO: 48 and the LC is encoded by a polynucleotide of SEQ ID NO: 51.

[0456] The invention also provides an isolated anti-TMEFF2 antibody or an antigen binding fragment thereof comprising a HCDR1, a HCDR2, a HCDR3, a LCDR1, a LCDR2 and a LCDR3 of SEQ ID NOs: 583, 585, 16, 18, 588 and 22, respectively.

[0457] In some embodiments, the isolated anti-TMEFF2 antibody or the antigen binding fragment thereof comprises a VH of SEQ ID NO: 589 and a VL of SEQ ID NO: 31.

[0458] In some embodiments, the VH is encoded by a polynucleotide of SEQ ID NO: 40 and the VL is encoded by a polynucleotide of SEQ ID NO: 45.

[0459] In some embodiments, the isolated anti-TMEFF2 antibody or the antigen binding fragment thereof comprises a HC of SEQ ID NO: 33 and a LC of SEQ ID NO: 38.

[0460] In some embodiments, the HC is encoded by a polynucleotide of SEQ ID NO: 47 and the LC is encoded by a polynucleotide of SEQ ID NO: 590.

[0461] The invention also provides an isolated anti-TMEFF2 antibody or an antigen binding fragment thereof comprising a HCDR1, a HCDR2, a HCDR3, a LCDR1, a LCDR2 and a LCDR3 of SEQ ID NOs: 582, 584, 587, 18, 588 and 603, respectively.

[0462] In some embodiments, the isolated anti-TMEFF2 antibody or the antigen-binding fragment thereof comprises a VH of SEQ ID NO: 604 and a VL of SEQ ID NO: 607.

[0463] In some embodiments, the VH is encoded by a polynucleotide of SEQ ID NO: 618 and the VL is encoded by a polynucleotide of SEQ ID NO: 619.

[0464] In some embodiments, the isolated anti-TMEFF2 antibody or the antigen binding fragment thereof comprises a HC of SEQ ID NO: 614 and a LC of SEQ ID NO: 615.

[0465] In some embodiments, the HC is encoded by a polynucleotide of SEQ ID NO: 620 and the LC is encoded by a polynucleotide of SEQ ID NO: 621.

[0466] The invention also provides an isolated anti-TMEFF2 antibody or an antigen binding fragment thereof comprising a HCDR1, a HCDR2, a HCDR3, a LCDR1, a LCDR2 and a LCDR3 of SEQ ID NOs: 582, 584, 587, 18, 588 and 603, respectively.

[0467] In some embodiments, the isolated anti-TMEFF2 antibody or the antigen binding fragment thereof comprises a VH of SEQ ID NO: 612 and a VL of SEQ ID NO: 613.

[0468] In some embodiments, the VH is encoded by a polynucleotide of SEQ ID NO: 622 and the VL is encoded by a polynucleotide of SEQ ID NO: 623.

[0469] In some embodiments, the isolated anti-TMEFF2 antibody or the antigen binding fragment thereof comprises a HC of SEQ ID NO: 616 and a LC of SEQ ID NO: 617.

[0470] In some embodiments, the HC is encoded by a polynucleotide of SEQ ID NO: 624 and the LC is encoded by a polynucleotide of SEQ ID NO: 625.

[0471] In some embodiments, the isolated anti-TMEFF2 antibody or the antigen binding fragment thereof is a multispecific antibody.

[0472] In some embodiments, the isolated anti-TMEFF2 antibody or the antigen binding fragment thereof is a bispecific antibody.

[0473] In some embodiments, the isolated anti-TMEFF2 bispecific antibody or the antigen binding fragment thereof binds a T cell antigen.

[0474] In some embodiments, the isolated anti-TMEFF2 bispecific antibody or the antigen binding fragment thereof binds CD3.

[0475] In some embodiments, the isolated anti-TMEFF2 bispecific antibody or the antigen-binding fragment thereof binds CD3 epsilon.

[0476] The VH, the VL, the HCDR, the LCDR, the HC and the LC sequences of exemplary anti-TMEFF2 antibodies of the invention are shown in Tables 60-67.

[0477] Although the embodiments illustrated in the Examples comprise pairs of variable domains, one from a heavy chain and one from a light chain, a skilled artisan will recognize that alternative embodiments may comprise single heavy or light chain variable domains. The single variable domain may be used to screen for variable domains capable of forming a two-domain specific antigen-binding fragment capable of binding to TMEFF2. The screening may be accomplished by phage display screening methods using for example hierarchical dual combinatorial approach disclosed in Int. Patent Publ. No. WO1992/01047. In this approach, an individual colony containing either a VH or a VL chain clone is used to infect a complete library of clones encoding the other chain (VL or VH), and the resulting two-chain specific antigen-binding domain is selected in accordance with phage display techniques using known methods and those described herein. Therefore, the individual VH and VL polypeptide chains are useful in identifying additional anti-TMEFF2 antibodies using the methods disclosed in Int. Patent Publ. No. WO1992/01047.

[0478] Bispecific Anti-TMEFF2/Anti-CD3 Antibodies

[0479] The invention also provides an isolated bispecific anti-TMEFF2/anti-CD3 antibody or an antigen binding fragment thereof comprising a first domain that binds TMEFF2 and a second domain that binds CD3, wherein the antibody binds to the membrane proximal region of TMEFF2. While not wishing to be bound by any particular theory, bispecific antibodies binding to the membrane proximal region of TMEFF2 may be more efficient in mediating T-cell mediated killing of tumor cells.

[0480] The invention also provides an isolated bispecific anti-TMEFF2/anti-CD3 antibody or an antigen binding fragment thereof comprising a first domain that binds TMEFF2 and a second domain that binds CD3, wherein the antibody competes for binding to the membrane proximal region of TMEFF2 with a reference antibody comprising a heavy chain variable region (VH) of SEQ ID NO: 25 and a light chain variable region (VL) of SEQ ID NO: 28, the VH of SEQ ID NO: 589 and the VL of SEQ ID NO: 29, the VH of SEQ ID NO: 27 and the VL of SEQ ID NO: 30, the VH of SEQ ID NO: 589 and the VL of SEQ ID NO: 31, the VH of SEQ ID NO: 604 and the VL of SEQ ID NO: 607, or the VH of SEQ ID NO: 612 and the VL of SEQ ID NO: 613.

[0481] In some embodiments, the isolated bispecific anti-TMEFF2/anti-CD3 antibody or an antigen binding fragment thereof binds the membrane proximal region of TMEFF2 with a dissociation constant (K_{D}) of about 0.4×10⁻⁹ M or less, wherein the K_{D} is measured using surface plasmon resonance in acetate buffer at pH 4.5-5.0 at room temperature.

[0482] In some embodiments, the isolated bispecific anti-TMEFF2/anti-CD3 antibody or the antigen binding fragment thereof binds the membrane proximal region TMEFF2 with the K_{D} of between about 0.1×10⁻¹⁰ M and about 0.4×10⁻⁹ M.

[0483] The invention also provides an isolated bispecific anti-TMEFF2/anti-CD3 antibody or an antigen binding fragment thereof, wherein the first domain comprises a HCDR1, a HCDR2, a HCDR3, a LCDR1, a LCDR2 and a LCDR3 of

[0484] SEQ ID NOs: 582, 584, 587, 18, 588 and 22, respectively;

[0485] SEQ ID NOs: 583, 585, 16, 19, 21 and 23, respectively;

[0486] SEQ ID NOs: 582, 586, 17, 18, 588 and 24, respectively; o

[0487] SEQ ID NOs: 583, 585, 16, 18, 588 and 22, respectively; or

[0488] SEQ ID NOs: 582, 584, 587, 18, 588 and 603, respectively.

[0489] The invention also provides an isolated bispecific anti-TMEFF2/anti-CD3 antibody or an antigen binding fragment thereof, wherein the second domain comprises the HCDR1, the HCDR2, the HCDR3, the LCDR1, the LCDR2 and the LCDR3 of SEQ ID NOs: 662, 663, 664, 671, 673, and 690, respectively.

[0490] The invention also provides an isolated bispecific anti-TMEFF2/anti-CD3 antibody or an antigen binding fragment thereof, wherein the first domain comprises

[0491] the VH of SEQ ID NO: 25 and the VL of SEQ ID NO: 28;

[0492] the VH of SEQ ID NO: 589 and the VL of SEQ ID NO: 29;

[0493] the VH of SEQ ID NO: 27 and the VL of SEQ ID NO: 30;

[0494] the VH of SEQ ID NO: 589 and the VL of SEQ ID NO: 31;

[0495] the VH of SEQ ID NO: 604 and the VL of SEQ ID NO: 607; or

[0496] the VH of SEQ ID NO: 612 and the VL of SEQ ID NO: 613.

[0497] The invention also provides an isolated bispecific anti-TMEFF2/anti-CD3 antibody or an antigen binding fragment thereof, wherein the second domain comprises

[0498] the VH of SEQ ID NO: 652 and the VL of SEQ ID NO: 661.

[0499] In some embodiments, the second domain comprises the VH of SEQ ID NO:657 and the VL of SEQ ID NO: 658.

[0500] The invention also provides an isolated bispecific anti-TMEFF2/anti-CD3 antibody or an antigen binding fragment thereof comprising a first domain that binds TMEFF2 and a second domain that binds CD3, wherein

[0501] the first domain comprises a HCDR1, a HCDR2, a HCDR3, a LCDR1, a LCDR2 and a LCDR3 of SEQ ID NOs: 582, 584, 587, 18, 588 and 22, respectively, and the second domain comprises the HCDR1, the HCDR2, the HCDR3, the LCDR1, the LCDR2 and the LCDR3 of SEQ ID NOs: 662, 663, 664, 671, 673, and 690, respectively;

[0502] the first domain comprises a VH of SEQ ID NO: 25 and a VL of SEQ ID NO: 28, and the 15 second domain comprises the VH of SEQ ID NO: 652 and the VL of SEQ ID NO: 661;

[0503] the first domain comprises a VH of SEQ ID NO: 25 and a VL of SEQ ID NO: 28, and the second domain comprises the VH of SEQ ID NO: 657 and the VL of SEQ ID NO: 678;

[0504] the bispecific anti-TMEFF2/anti-CD3 antibody or the antigen binding fragment thereof comprises a HC1 of SEQ ID NO: 32, a LC1 of SEQ ID NO: 35, a HC2 of SEQ ID NO: 640 and a LC2 of SEQ ID NO: 676; and/or

[0505] the bispecific anti-TMEFF2/anti-CD3 antibody or the antigen binding fragment thereof comprises a HC1 of SEQ ID NO: 32, a LC1 of SEQ ID NO: 35, a HC2 of SEQ ID NO: 675 and a LC2 of SEQ ID NO: 677.

[0506] The invention also provides an isolated bispecific anti-TMEFF2/anti-CD3 antibody or an antigen binding fragment thereof comprising a first domain that binds TMEFF2 and a second domain that binds CD3, wherein

[0507] the first domain comprises a HCDR1, a HCDR2, a HCDR3, a LCDR1, a LCDR2 and a LCDR3 of SEQ ID NOs: 583, 585, 16, 19, 21, and 23, respectively, and the second domain comprises the HCDR1, the HCDR2, the HCDR3, the LCDR1, the LCDR2 and the LCDR3 of SEQ ID NOs: 662, 663, 664, 671, 673, and 690, respectively;

[0508] the first domain comprises a VH of SEQ ID NO: 589 and a VL of SEQ ID NO: 29, and the second domain comprises the VH of SEQ ID NO: 652 and the VL of SEQ ID NO: 661;

[0509] the first domain comprises a VH of SEQ ID NO: 589 and a VL of SEQ ID NO: 29, and the second domain comprises the VH of SEQ ID NO: 657 and the VL of SEQ ID NO: 678 and/or

[0510] the bispecific anti-TMEFF2/anti-CD3 antibody or the antigen binding fragment thereof comprises a HC1 of SEQ ID NO: 33, a LC1 of SEQ ID NO: 36, a HC2 of SEQ ID NO: 640 and a LC2 of SEQ ID NO: 676;

[0511] the bispecific anti-TMEFF2/anti-CD3 antibody or the antigen binding fragment thereof comprises a HC1 of SEQ ID NO: 33, a LC1 of SEQ ID NO: 36, a HC2 of SEQ ID NO: 675 and a LC2 of SEQ ID NO: 677.

[0512] The invention also provides an isolated bispecific anti-TMEFF2/anti-CD3 antibody or an antigen binding fragment thereof comprising a first domain that binds TMEFF2 and a second domain that binds CD3, wherein

[0513] the first domain comprises a HCDR1, a HCDR2, a HCDR3, a LCDR1, a LCDR2 and a LCDR3 of SEQ ID NOs: 582, 586, 17, 18, 588 and 24, respectively, and the second domain comprises the HCDR1, the HCDR2, the HCDR3, the LCDR1, the LCDR2 and the LCDR3 of SEQ ID NOs: 662, 663, 664, 671, 673, and 690, respectively;

[0514] the first domain comprises a VH of SEQ ID NO: 27 and a VL of SEQ ID NO: 30, and the second domain comprises the VH of SEQ ID NO: 652 and the VL of SEQ ID NO: 661;

[0515] the first domain comprises a VH of SEQ ID NO: 27 and a VL of SEQ ID NO: 30, and the second domain comprises the VH of SEQ ID NO: 657 and the VL of SEQ ID NO: 678, and/or

[0516] the bispecific anti-TMEFF2/anti-CD3 antibody or the antigen binding fragment thereof comprises a HC1 of SEQ ID NO: 34, a LC1 of SEQ ID NO: 37, a HC2 of SEQ ID NO: 640 and a LC2 of SEQ ID NO: 676;

[0517] the bispecific anti-TMEFF2/anti-CD3 antibody or the antigen binding fragment thereof comprises a HC1 of SEQ ID NO: 34, a LC1 of SEQ ID NO: 37, a HC2 of SEQ ID NO: 675 and a LC2 of SEQ ID NO: 677.

[0518] The invention also provides an isolated bispecific anti-TMEFF2/anti-CD3 antibody or an antigen binding fragment thereof comprising a first domain that binds TMEFF2 and a second domain that binds CD3, wherein

[0519] the first domain comprises a HCDR1, a HCDR2, a HCDR3, a LCDR1, a LCDR2 and a LCDR3 of SEQ ID NOs: 583, 585, 16, 18, 588 and 22, respectively, and the second domain comprises the HCDR1, the HCDR2, the HCDR3, the LCDR1, the LCDR2 and the LCDR3 of SEQ ID NOs: 662, 663, 664, 671, 673, and 690, respectively;

[0520] the first domain comprises a VH of SEQ ID NO: 589 and a VL of SEQ ID NO: 31, and the second domain comprises the VH of SEQ ID NO: 652 and the VL of SEQ ID NO: 661;

[0521] the first domain comprises a VH of SEQ ID NO: 589 and a VL of SEQ ID NO: 31, and the second domain comprises the VH of SEQ ID NO: 657 and the VL of SEQ ID NO: 678; and/or

[0522] the bispecific anti-TMEFF2/anti-CD3 antibody or the antigen binding fragment thereof comprises a HC1 of SEQ ID NO: 33, a LC1 of SEQ ID NO: 38, a HC2 of SEQ ID NO:640 and a LC2 of SEQ ID NO: 676;

[0523] the bispecific anti-TMEFF2/anti-CD3 antibody or the antigen binding fragment thereof comprises a HC1 of SEQ ID NO: 33, a LC1 of SEQ ID NO: 38, a HC2 of SEQ ID NO:675 and a LC2 of SEQ ID NO: 677.

[0524] The invention also provides an isolated bispecific anti-TMEFF2/anti-CD3 antibody or an antigen binding fragment thereof comprising a first domain that binds TMEFF2 and a second domain that binds CD3, wherein

[0525] the first domain comprises a HCDR1, a HCDR2, a HCDR3, a LCDR1, a LCDR2 and a LCDR3 of SEQ ID NOs: 582, 584, 587, 18, 588 and 603, respectively, and the second domain comprises the HCDR1, the HCDR2, the HCDR3, the LCDR1, the LCDR2 and the LCDR3 of SEQ ID NOs: 662, 663, 664, 671, 673, and 690, respectively;

[0526] the first domain comprises a VH of SEQ ID NO: 604 and a VL of SEQ ID NO: 607, and the second domain comprises the VH of SEQ ID NO: 652 and the VL of SEQ ID NO: 661;

[0527] the first domain comprises a VH of SEQ ID NO: 604 and a VL of SEQ ID NO: 607, and the second domain comprises the VH of SEQ ID NO: 657 and the VL of SEQ ID NO: 678; and/or

[0528] the bispecific anti-TMEFF2/anti-CD3 antibody or the antigen binding fragment thereof comprises a HC1 of SEQ ID NO: 614, a LC1 of SEQ ID NO: 615, a HC2 of SEQ ID NO: 640 and a LC2 of SEQ ID NO: 676;

[0529] the bispecific anti-TMEFF2/anti-CD3 antibody or the antigen binding fragment thereof comprises a HC1 of SEQ ID NO: 614, a LC1 of SEQ ID NO: 615, a HC2 of SEQ ID NO: 675 and a LC2 of SEQ ID NO: 677.

[0530] The invention also provides an isolated bispecific anti-TMEFF2/anti-CD3 antibody or an antigen binding fragment thereof comprising a first domain that binds TMEFF2 and a second domain that binds CD3, wherein

[0531] the first domain comprises a HCDR1, a HCDR2, a HCDR3, a LCDR1, a LCDR2 and a LCDR3 of SEQ ID NOs: 582, 584, 587, 18, 588 and 603, respectively, and the second domain comprises the HCDR1, the HCDR2, the HCDR3, the LCDR1, the LCDR2 and the LCDR3 of SEQ ID NOs: 662, 663, 664, 671, 673, and 690, respectively;

[0532] the first domain comprises a VH of SEQ ID NO: 612 and a VL of SEQ ID NO: 613, and the second domain comprises the VH of SEQ ID NO: 652 and the VL of SEQ ID NO: 661;

[0533] the first domain comprises a VH of SEQ ID NO: 612 and a VL of SEQ ID NO: 613, and the second domain comprises the VH of SEQ ID NO: 657 and the VL of SEQ ID NO: 678; and/or

[0534] the bispecific anti-TMEFF2/anti-CD3 antibody or an antigen binding fragment thereof comprises a HC1 of SEQ ID NO: 616, a LC1 of SEQ ID NO: 617, a HC2 of SEQ ID NO: 640 and a LC2 of SEQ ID NO: 676;

[0535] the bispecific anti-TMEFF2/anti-CD3 antibody or an antigen binding fragment thereof comprises a HC1 of SEQ ID NO: 616, a LC1 of SEQ ID NO: 617, a HC2 of SEQ ID NO: 675 and a LC2 of SEQ ID NO: 677.

### EMBODIMENTS

[0536] This invention provides the following non-limiting embodiments.
[0537] 1. An isolated recombinant anti-CD3 antibody, or antigen-binding fragment thereof, comprising:
   [0538] a) a heavy chain comprising a heavy chain complementarity determining region (HCDR) 1 comprising SEQ ID NO: 662; a HCDR2 comprising SEQ ID NO: 663; and a HCDR3 comprising SEQ ID NO: 664 and a light chain comprising a light chain complementarity determining region (LCDR) 1 comprising SEQ ID NO: 671, a LCDR2 comprising SEQ ID NO: 673, and a LCDR3 comprising SEQ ID NO: 690;
   [0539] b) a heavy chain variable region comprising SEQ ID NO: 652 and a light chain variable region comprising SEQ ID NO: 661;
   [0540] c) a heavy chain comprising SEQ ID NO: 640 and a light chain comprising SEQ ID NO: 676;
   [0541] d) a heavy chain comprising a HCDR1 comprising SEQ ID NO: 662; a HCDR2 comprising SEQ ID NO: 663; and a HCDR3 comprising SEQ ID NO: 664 and a light chain comprising a LCDR1 comprising SEQ ID NO: 773, a LCDR2 comprising SEQ ID NO: 673, and a LCDR3 comprising SEQ ID NO: 690;
   [0542] e) a heavy chain variable region comprising SEQ ID NO: 657 and a light chain variable region comprising SEQ ID NO: 678; or
   [0543] f) a heavy chain comprising SEQ ID NO: 675 and a light chain comprising SEQ ID NO: 678.
[0544] 2. An isolated recombinant anti-CD3 antibody or antigen-binding fragment thereof, wherein the antibody or antigen-binding fragment specifically binds Macaca fascicularis or human CD3d, or CD3e, or CD3e and CD3d with a binding affinity of about 300 nM or less.
[0545] 3. The isolated recombinant anti-CD3 antibody or antigen-binding fragment thereof of embodiment 2, wherein the binding affinity is about 100 nM or less.
[0546] 4. The isolated recombinant anti-CD3 antibody or antigen-binding fragment thereof of embodiment 2 or 3, wherein the binding affinity is measured by flow cytometry or by Proteon surface plasmon resonance assay ProteOn XPR36 system at +25° C.
[0547] 5. The isolated recombinant anti-CD3 antibody or antigen-binding fragment thereof of any one of the previous embodiments, wherein the antibody or antigen-binding fragment has one, two, three, or four of the following properties:
   [0548] a) binds human and Macaca fascicularis CD3+ T lymphocytes with a calculated EC50 of 300 nM or less and binds Macaca fascicularis CD3-expressing HEK cells with a calculated EC50 of 300 nM or less, wherein the difference in calculated EC50 between binding CD3+ T lymphocytes and binding Macaca fascicularis CD3-expressing HEK cells is less than 5-fold, and wherein the calculated EC50 is measured in a whole cell binding assay at 0° C. using flow cytometry;
   [0549] b) binds recombinant CD3d from human (SEQ ID NO:691), or binds recombinant CD3e from human (SEQ ID NO:636), or binds recombinant CD3d from Macaca fascicularis (SEQ ID NO:692), or binds recombinant CD3e from Macaca fascicularis (SEQ ID NO:693) with an equilibrium dissociation constant (K_{D}) of 300 nM or less, wherein the K_{D} is measured using Proteon surface plasmon resonance assay ProteOn XPR36 system at +25° C.;
   [0550] c) binds residues 1-6 of CD3e as determined by X-ray crystallography; or
   [0551] d) activates T cells or induces CD69 expression to a similar degree as cOKT3 or SP34-2 as determined by fluorescence-activated cell sorting assay.
[0552] 6. The antibody or antigen-binding fragment thereof of any one of the previous embodiments comprising at least one substitution in an antibody constant domain, the at least one substitution comprising:
   [0553] a) heavy chain substitutions K409R, F405L, or F405L and R409K;
   [0554] b) heavy chain substitutions S228P, F234A, and L235A;
   [0555] c) heavy chain substitutions L234A, G237A, P238S, H268A, A330S and P331S, wherein the antibody is an IgG1 isotype; or
   [0556] d) heavy chain substitution S228P, wherein the antibody is an IgG4 isotype; wherein residue numbering is according to the EU Index.
[0557] 7. The antibody or antigen-binding fragment thereof of any one of the previous embodiments, comprising the HCDR1, the HCDR2, the HCDR3, the LCDR1, the LCDR2, and the LCDR3 of SEQ ID NOs:662, 663, 664, 671, 673, and 690, respectively.
[0558] 8. The antibody or antigen-binding fragment thereof of any one of the previous embodiments, comprising a heavy chain variable region (VH) and a light chain variable region (VL) of SEQ ID NOs:652 and 661, respectively.
[0559] 9. The antibody or antigen-binding fragment thereof of any one of the previous embodiments, comprising a heavy chain sequence (HC) and a light chain sequence (LC) of SEQ ID NOs:640 and 676, respectively.
[0560] 10. The antibody or antigen-binding fragment thereof of any one of embodiments 1-5, comprising the HCDR1, the HCDR2, the HCDR3, the LCDR1, the LCDR2, and the LCDR3 of SEQ ID NOs:662, 663, 664, 773, 673, and 690, respectively.
[0561] 11. The antibody or antigen-binding fragment thereof of any one of embodiments 1-5, comprising a VH and a VL of SEQ ID NOs:657 and 678, respectively.
[0562] 12. The antibody or antigen-binding fragment thereof of any one of embodiments 1-5, comprising a HC and a LC of SEQ ID NOs:675 and 677, respectively.
[0563] 13. An antibody or antigen-binding fragment thereof, comprising the HCDR1, the HCDR2, the HCDR3, the LCDR1, the LCDR2, and the LCDR3 of SEQ ID NOs: 662, 663, 664, 671, 673, and 690, respectively.
[0564] 14. An antibody or antigen-binding fragment thereof, comprising a VH and a VL of SEQ ID NOs:652 and 661, respectively.
[0565] 15. An antibody or antigen-binding fragment thereof, comprising a HC and a LC of SEQ ID NOs:640 and 676, respectively.
[0566] 16. An antibody or antigen-binding fragment thereof, comprising the HCDR1, the HCDR2, the HCDR3, the LCDR1, the LCDR2, and the LCDR3 of SEQ ID NOs:662, 663, 664, 773, 673, and 690, respectively.
[0567] 17. An antibody or antigen-binding fragment thereof, comprising a VH and a VL of SEQ ID NOs:657 and 678, respectively.
[0568] 18. An antibody or antigen-binding fragment thereof, comprising a HC and a LC of SEQ ID NOs:675 and 677, respectively.
[0569] 19. The antibody or antigen-binding fragment thereof of any one of the previous embodiments, wherein the antibody is human or humanized.
[0570] 20. The antibody of embodiment 19, wherein the antibody is an IgG4 or IgG1 isotype.
[0571] 21. The antibody of embodiment 20, comprising one, two, three, four, five, six, seven, eight, nine or ten substitutions in the antibody Fc.
[0572] 22. The antibody of embodiment 18, comprising:
   [0573] a) D43G, L49M, L50I, S62N, Q85E light chain substitutions;
   [0574] b) D43G, V48L, L49M, L50I, S62N, Q85E, H89Y light chain substitutions;
   [0575] c) R10G, R13K, V73I, R70K, T83S, L96V heavy chain substitutions;
   [0576] d) any one of light chain substitutions D43G, V48L, L49M, L50I, S62N, Q85E, or H89Y; or
   [0577] e) any one of heavy chain substitutions R10G, R13K, V73I, R79K, T83S, or L96V, wherein residue numbering for light chain substitutions is according to SEQ ID No: 661, and for heavy chain substitutions is according to SEQ ID No: 652.
[0578] 23. The antibody of any one of the previous embodiments, wherein the antibody is bispecific or multispecific.
[0579] 24. A bispecific antibody comprising a first domain that specifically binds CD3 and a second domain that specifically binds a second antigen, wherein the first domain comprises the HCDR1, the HCDR2, the HCDR3, the LCDR1, the LCDR2, and the LCDR3 of SEQ ID NOs:662, 663, 664, 671, 673, and 690, respectively.
[0580] 25. The bispecific antibody of embodiment 24 wherein the first domain and second domain are an IgG4 isotype, and wherein the first or the second domain comprises S228P, F234A, L235A, F405L and R409K heavy chain substitutions and the other domain of the first or the second domain comprises S228P, F234A and L235A heavy chain substitution, wherein residue numbering is according to the EU Index.
[0581] 26. The bispecific antibody of embodiment 24, wherein the first and/or the second domain comprises at least one substitution in a CH3 constant domain comprising a F405L, or F405L and R409K substitution, wherein residue numbering is according to the EU Index.
[0582] 27. The bispecific antibody of embodiment 24, wherein one of the first or the second domains comprises a F405L heavy chain substitution and the other of the first or second domains comprises a K409R heavy chain substitution, wherein residue numbering is according to the EU Index.
[0583] 28. The bispecific antibody of embodiment 24, wherein the first domain and the second domain are an IgG4 isotype, wherein one of the first or the second domains comprises a S228P heavy chain substitution and the other of the first or the second domains comprises S228P, F405L and R409K heavy chain substitutions, wherein residue numbering is according to the EU Index.
[0584] 29. The bispecific antibody of claim 24, wherein the first domain comprises the VH and the VL of SEQ ID NOs: 652 and 661, respectively.
[0585] 30. The bispecific antibody of claim 24, wherein the first domain comprises the HC and the LC of SEQ ID NOs: 640 and 676, respectively.
[0586] 31. The bispecific antibody of claim 24, wherein the first domain comprises the VH and the VL of SEQ ID NOs:657 and 678, respectively.
[0587] 32. The bispecific antibody of claim 24, wherein the first domain comprises the HC and the LC of SEQ ID NOs:675 and 677, respectively.
[0588] 33. The bispecific antibody of claim 24, wherein the second antigen is a cell surface antigen that is expressed on a target cell other than an immune effector cell.
[0589] 34. The bispecific antibody of claim 33, wherein the cell surface antigen is a tumor associated antigen.
[0590] 35. The bispecific antibody of any one of claims 24-34, wherein the second antigen is CD33, IL1RAP, PSMA or TMEFF2.
[0591] 36. The bispecific antibody of embodiment 35, wherein the first domain comprises the HCDR1, HCDR2, the HCDR3, the LCDR1, the LCDR2, and the LCDR3 of SEQ ID NOs:662, 663, 664, 671, 673, and 690, respectively; and wherein the second domain comprises the HCDR1, HCDR2, the HCDR3, the LCDR1, the LCDR2, and the LCDR3 of SEQ ID NOs:78, 683, 80, 81, 792, and 686, respectively.
[0592] 37. The bispecific antibody of embodiment 33, wherein the first domain comprises the VH and VL of SEQ ID NOs:652 and 661, respectively; and wherein the second domain comprises the VH and VL of SEQ ID NOs:681 and 682, respectively.
[0593] 38. The bispecific antibody of embodiment 33, wherein the first domain comprises the HC and LC of SEQ ID NOs:640 and 676, respectively; and wherein the second domain comprises the HC and LC of SEQ ID NOs:679 and 680, respectively.
[0594] 39. The bispecific antibody of embodiment 33, wherein the first domain comprises the HCDR1, HCDR2, the HCDR3, the LCDR1, the LCDR2, and the LCDR3 of SEQ ID NOs:662, 663, 664, 671, 673, and 690, respectively; and wherein the second domain comprises the HCDR1, HCDR2, the HCDR3, the LCDR1, the LCDR2, and the LCDR3 of SEQ ID NOs:78, 3, 80, 81, 792 and 686, respectively.
[0595] 40. The bispecific antibody of embodiment 33, wherein the first domain comprises the VH and VL of SEQ ID NOs:652 and 661, respectively; and wherein the second domain comprises the VH and VL of SEQ ID NOs 8 and 682, respectively.
[0596] 41. The bispecific antibody of embodiment 33, wherein the first domain comprises the HC and LC of SEQ ID NOs:640 and 676, respectively; and wherein the second domain comprises the HC and LC of SEQ ID NOs 13 and 680, respectively.
[0597] 42. The bispecific antibody of embodiment 33, wherein the first domain comprises the HCDR1, HCDR2, the HCDR3, the LCDR1, the LCDR2, and the LCDR3 of SEQ ID NOs:662, 663, 664, 671, 673, and 690, respectively; and wherein the second domain comprises the HCDR1, HCDR2, the HCDR3, the LCDR1, the LCDR2, and the LCDR3 of SEQ ID NOs:78, 79, 80, 81, 82 and 83, respectively.
[0598] 43. The bispecific antibody of embodiment 33, wherein the first domain comprises the VH and VL of SEQ ID NOs:652 and 661, respectively; and wherein the second domain comprises the VH and VL of SEQ ID NOs: 116 and 117, respectively.
[0599] 44. The bispecific antibody of embodiment 33, wherein the first domain comprises the HC and LC of SEQ ID NOs:640 and 676, respectively; and wherein the second domain comprises the HC and LC of SEQ ID NOs: 138 and 139, respectively.
[0600] 45. The bispecific antibody of embodiment 31, wherein the first domain comprises the HCDR1, HCDR2, the HCDR3, the LCDR1, the LCDR2, and the LCDR3 of SEQ ID NOs: 662, 663, 664, 671, 673, and 670, respectively; and wherein the second domain comprises the HCDR1, HCDR2, the HCDR3, the LCDR1, the LCDR2, and the LCDR3 of SEQ ID NOs:164, 165, 166, 167, 168, and 169, respectively.
[0601] 46. The bispecific antibody of embodiment 31, wherein the first domain comprises the VH and VL of SEQ ID NOs:652 and 661, respectively; and wherein the second domain comprises the VH and VL of SEQ ID NOs:215 and 216, respectively.
[0602] 47. The bispecific antibody of embodiment 31, wherein the first domain comprises the HCDR1, HCDR2, the HCDR3, the LCDR1, the LCDR2, and the LCDR3 of SEQ ID NOs: 662, 663, 664, 671, 673, and 670, respectively; and wherein the second domain comprises the HCDR1, HCDR2, the HCDR3, the LCDR1, the LCDR2, and the LCDR3 of SEQ ID NOs:349, 390, 341, 471, 513, and 555, respectively.
[0603] 48. The bispecific antibody of embodiment 31, wherein the first domain comprises the VH and VL of SEQ ID NOs:652 and 661, respectively; and wherein the second domain comprises the VH and VL of SEQ ID NOs:267 and 306, respectively.
[0604] 49. The bispecific antibody of embodiment 31, wherein the first domain comprises the HCDR1, HCDR2, the HCDR3, the LCDR1, the LCDR2, and the LCDR3 of SEQ ID NOs: 662, 663, 664, 671, 673, and 670, respectively; and wherein the second domain comprises the HCDR1, HCDR2, the HCDR3, the LCDR1, the LCDR2, and the LCDR3 of SEQ ID NOs:363, 404, 445, 485, 527, and 569, respectively.
[0605] 50. The bispecific antibody of embodiment 31, wherein the first domain comprises the VH and VL of SEQ ID NOs:652 and 661, respectively; and wherein the second domain comprises the VH and VL of SEQ ID NOs:281 and 320, respectively.
[0606] 51. A pharmaceutical composition comprising the antibody of any one of the previous embodiments and a pharmaceutically acceptable carrier.
[0607] 52. A polynucleotide encoding the antibody of any one of the embodiments 1-50.
[0608] 53. A vector comprising the polynucleotide of embodiment 52.
[0609] 54. A host cell comprising the vector of embodiment 53.
[0610] 55. A method of producing the antibody of any one of embodiments 1-50, comprising culturing the host cell of embodiment 52 in conditions that the antibody is expressed, and recovering the antibody produced by the host cell.
[0611] 56. A method of treating a cancer in a subject, comprising administering a therapeutically effective amount of the isolated antibody of any one of embodiments 1-50 to the subject in need thereof for a time sufficient to treat the cancer.
[0612] 57. The method of embodiment 56, wherein the cancer is a solid tumor or a hematological malignancy.
[0613] 58. The method of embodiment 57, wherein the solid tumor is a prostate cancer, a colorectal cancer, a gastric cancer, a clear cell renal carcinoma, a bladder cancer, a lung cancer, a squamous cell carcinoma, a glioma, a breast cancer, a kidney cancer, a neovascular disorder, a clear cell renal carcinoma (CCRCC), a pancreatic cancer, a renal cancer, a urothelial cancer or an adenocarcinoma to the liver.
[0614] 59. The method of embodiment 58, wherein the prostate cancer is a refractory prostate cancer, a prostatic intraepithelial neoplasia, an androgen independent prostate cancer, or a malignant prostate cancer.
[0615] 60. The method of embodiment 57, wherein the hematological malignancy is acute myeloid leukemia (AML), myelodysplastic syndrome (MDS), acute lymphocytic leukemia (ALL), diffuse large B-cell lymphoma (DLBCL), chronic myeloid leukemia (CML) or blastic plasmacytoid dendritic cell neoplasm (DPDCN).
[0616] 61. The method of any one of embodiments 56-60, wherein the antibody is administered in combination with a second therapeutic agent.
[0617] 62. The antibody of any one of embodiments 1-50 for use in therapy.
[0618] 63. An anti-idiotypic antibody binding to the antibody of any one of embodiments 1-50.

### EXAMPLES

[0619] 1 De Novo Generation and Functional Characterization of Anti-CD3 mAbs

[0620] 1-1 Immunization of OmniRats® with CD3 Antigens to Generate CD3 Monoclonal Antibodies

[0621] OmniRats® were immunized with proprietary vectors (Aldevron, Fargo, N. Dak., USA) encoding for: human CD3e and human CD3d; cynomolgus CD3e and cynomolgus CD3d. Animals received alternating boosts with human and cynomolgus DNA. From the 6th application on, the animals received optimized vectors with the same insert. Cells from lymph nodes were fused with the Ag8 myeloma cell line. 40 million cells from fusion BLW were put on three 96-well plates following IgM depletion. 133 million cells from fusion BLX were put on nine 96-well plates without IgM depletion.

[0622] Hybridoma supernatants from fusions BLW (with magnetic bead depletion of lymphocytes) and BLX (without magnetic bead depletion of lymphocytes) were analyzed a) by a cell-based ELISA (CELISA) on cells transiently transfected with human and cynomolgus cDNA cloned into screening vectors: pOPT-CD3e-hum-epsilon-TCE.OMT+pOPT-CD3d-hum-delta. OMT, 1:1 (pOPT-CD3e/d-hum-mix) and pcDNA3.1-CD3e-cyn-delta+pcDNA3.1-CD3d-cyn-delta, 1:1 (pcDNA3.1-CD3e/d-cyn-mix). Human and cynomolgus cDNA sequences (and corresponding amino acid sequences) are provided in Table 4. For CELISA negative control, non-transfected mammalian cells were incubated with hybridoma supernatants and detected with the secondary Bethyl antibody. For a CELISA transfection control, mammalian cells, transfected with the constructs described above, were detected with anti-tag antibody.

[0623] Hybridoma supernatants were further analyzed by flow cytometry (FACS) on CD3 positive and CD3 negative Jurkat cells: Jurkat CD3+ (E6-1) and Jurkat CD3− (J.RT3-T3.5). For FACS negative control, CD3 negative Jurkat cells (J.RT3-T3.5), were incubated with dilution buffer and detected with Southern anti-rat Ig HRP and Bethyl anti-rat IgG1, 2a, 2b, 2c-HRP secondary antibodies.

[0624] The specificity of the antibodies in the hybridoma supernatants of the hybridomas from fusion BLW and fusion BLX for human and cynomolgus CD3e/d complex presented on transiently transfected cells or, in the case of the human CD3e/d complex on Jurkat CD3+ (E6-1) cells, was demonstrated by CELISA on transiently transfected cells, as well as when tested in FACS on Jurkat cell lines (Table 3). No significant signal was detected for any samples in the experimental samples serving as negative controls.

TABLE 3
Test of the specificity of individual hybridoma supernatants by cell-based ELISA
(top) and by flow-cytometry (bottom). CELISA values represent the relative fluorescence
units (rfu) of each sample. FACS values represent the geometric means (geomean)
of the relative fluorescence intensities of each sample.

| | | Cell based ELISA (relative fluorescence units) | | | | | |
|---|---|---|---|---|---|---|---|
| | | Hybridoma supernatants incubated on cells transfected with: | | | | | |
| | | | | | | Non-transfected | |
| | | pOPT-CD3e/d- | | pcDNA3.1- | | CHO negative | |
| | | hum-mix | | CD3e/d-cyn-mix | | control | |
| No | Clone | Rfu | % positive | Rfu | % positive | Rfu | % positive |
| | | BLW: fusion with lymphocytes from immunization | | | | | |
| | | group MR14-379 rat 1&2 (magnetic- | | | | | |
| | | bead depletion of IgM+ applied) | | | | | |
| 1 | BLW-2B4 | 689 | 101 | 230 | 47 | 30 | |
| 2 | BLW-2E6 | 231 | 34 | 121 | 25 | 20 | |
| 3 | BLW-3B4 | 867 | 127 | 320 | 66 | 24 | |
| | | BLX: fusion with lymphocytes from immunization | | | | | |
| | | group MR14-379 rat 1&2 (without | | | | | |
| | | magnetic-bead depletion of IgM+) | | | | | |
| 4 | BLX-1F8 | 689 | 101 | 230 | 47 | 30 | |
| 5 | BLX-2E9 | 867 | 127 | 320 | 66 | 24 | |
| 6 | BLX-3F4 | 896 | 131 | 371 | 76 | 17 | |
| 7 | BLX-3G8 | 759 | 111 | 340 | 70 | 22 | |
| 8 | BLX-4D9 | 1042 | 153 | 483 | 99 | 24 | |
| 9 | BLX-6A2 | 110 | 16 | 38 | 8 | 19 | |
| | Positive | 682 | 100 | 488 | 100 | — | |
| | control | | | | | | |
| | Negative | 25 | 4 | 42 | 9 | — | |
| | control | | | | | | |

| | | Flow Cytometry (FACS) | | | |
|---|---|---|---|---|---|
| | | Hybridoma supernatants incubated on Jurkat cell line | | | |
| | | | | Jurkat CD3− (J.RT3.T3.5) | |
| | | Jurkat CD3+ (E6-1) | | negative control | |
| No | Clone | geomean | % positive | geomean | % positive |
| | | BLW: fusion with lymphocytes from immunization | | | |
| | | group MR14-379 rat 1&2 (magnetic- | | | |
| | | bead depletion of IgM+ applied) | | | |
| 1 | BLW-2B4 | 148034 | 53 | 4012 | |
| 2 | BLW-2E6 | 7503 | 3 | 687 | |
| 3 | BLW-3B4 | 198849 | 72 | 2884 | |
| | | BLX: fusion with lymphocytes from immunization | | | |
| | | group MR14-379 rat 1&2 (without | | | |
| | | magnetic-bead depletion of IgM+) | | | |
| 4 | BLX-1F8 | 148034 | 53 | 4012 | |
| 5 | BLX-2E9 | 198849 | 72 | 2884 | |
| 6 | BLX-3F4 | 181963 | 66 | 4613 | |
| 7 | BLX-3G8 | 214697 | 77 | 3096 | |
| 8 | BLX-4D9 | 25839 | 9 | 1471 | |
| 9 | BLX-6A2 | 3385 | 1 | 1219 | |
| | Positive | 277338 | 100 | 2051 | |
| | control | | | | |
| | Negative | 869 | 0 | 599 | |
| | control | | | | |

TABLE 4
CD3 sequences used for immunization

| | |
|---|---|
| Human CD3d | NP_000723.1 (www.uniprot.org/uniprot/P04234) |
| | (SEQ ID NO: 691) |
| Human CD3e | (NP_000724.1 (www.uniprot.org/uniprot/P07766) |
| | (SEQ ID NO: 636) |
| Cyno CD3d | XP_001097302 (www.uniprot.org/uniprot/Q95LI8) |
| | (SEQ ID NO: 692) |
| Cyno CD3e | CD3e + TCE (www.uniprot.org/uniprot/Q95LI5) |
| | (SEQ ID NO: 693) |

[0625] 1-2 Cloning Anti-CD3 Antibodies

[0626] Anti-human CD3 antibodies were generated in OmniRats (OMT, Palo Alto, Calif., USA). Variable region (“V region”) sequences of these clones were extracted from the genomic sequences and analyzed. All sequences obtained were either human IgG heavy chain or lambda light chain and the sequences, especially LC, showed high homology. Aligning the sequences to germline showed some mutations in the framework (FIG. 1). The V-region DNA sequences were synthesized and cloned into mammalian expression vectors, heavy chain sequences into human IgG1 vector and light chain sequences into human lambda vector. Sequences are shown in Tables 6 and 7. Seven mAbs were assigned protein identifiers (Table 5A).

[0627] CD3B312 was chosen as the most representative clone and the heavy chain sequences were cloned into human IgG1sigma and IgG4 PAA with S228P, F234A, L235A mutations and assigned protein identifiers as shown in Table 5B. These were used to generate bispecific antibodies and to demonstrate T cell redirection functionality through cytotoxicity.

TABLE 5A
Peptide ID and protein ID of clones

| clone ID | HC peptide ID | LC peptide ID | protein ID |
|---|---|---|---|
| BLW-2B4 | CD3H218 | CD3L123 | CD3B311 |
| BLW-2E6 | CD3H219 | CD3L124 | CD3B312 |
| BLW-3B4 | CD3H218 | CD3L125 | CD3B313 |
| BLX-1F8 | CD3H220 | CD3L126 | CD3B314 |
| BLX-2E9 | CD3H221 | CD3L124 | CD3B315 |
| BLX-3F4 | CD3H222 | CD3L124 | CD3B316 |
| BLX-3G8 | CD3H223 | CD3L124 | CD3B317 |

TABLE 5B
CD3B312 was chosen as the most representative clone and the
heavy chain sequences were cloned into human IgG1 sigma and
IgG4 PAA with mutations and assigned protein identifiers.

| IgG1 | IgG1sigma | IgG4PAA |
|---|---|---|
| CD3B312 | CD3B337 | CD3B373 |

TABLE 6
Heavy chain and light chain sequences of 7 monoclonal CD3 antibodies

| Protein | | SEQ | | SEQ |
|---|---|---|---|---|
| AA ID | Heavy Chain Amino Acid Sequence | ID NO. | Light Chain Amino Acid Sequence | ID NO. |
| CD3B311 | HC Peptide ID: CD3H218 | (637) | LC Peptide ID: CD3L123 | (645) |
| (BLW-2B4) | QVQLQQSGPGLVKPSQTLSLTCAISGDSVFN | | QSALTQPASVSGSPGQSITISCTGTSSNIGT | |
| | NNAAWTWIRQSPSRGLEWLGRTYYRSKWLYD | | YKFVSWYQQHPDKAPKVLLYEVSKRPSGVSS | |
| | YAVSVKSRITVNPDTSRNQFTLQLKSVTPED | | RFSGSKSGNTASLTISGLQAEDQADYHCCSY | |
| | TALYYCSRGYSSSFDYWGQGTLVTVSSASTK | | AGSGTLLFGGGTKLTVLGQPKAAPSVTLFPP | |
| | GPSVFPLAPSSKSTSGGTAALGCLVKDYFPE | | SSEELQANKATLVCLISDFYPGAVTVAWKAD | |
| | PVTVSWNSGALTSGVHTFPAVLQSSGLYSLS | | SSPVKAGVETTTPSKQSNNKYAASSYLSLTP | |
| | SVVTVPSSSLGTQTYICNVNHKPSNTKVDKK | | EQWKSHRSYSCQVTHEGSTVEKTVAPTECS | |
| | VEPKSCDKTHTCPPCPAPELLGGPSVFLFPP | | | |
| | KPKDTLMISRTPEVTCVVVDVSHEDPEVKFN | | | |
| | WYVDGVEVHNAKTKPREEQYNSTYRVVSVLT | | | |
| | VLHQDWLNGKEYKCKVSNKALPAPIEKTISK | | | |
| | AKGQPREPQVYTLPPSREEMTKNQVSLTCLV | | | |
| | KGFYPSDIAVEWESNGQPENNYKTTPPVLDS | | | |
| | DGSFFLYSKLTVDKSRWQQGNVFSCSVMHEA | | | |
| | LHNHYTQKSLSLSPGK | | | |
| CD3B312 | HC Peptide ID: CD3H219 | (640) | LC Peptide ID: CD3L124 | (646) |
| (BLW-2E6) | QVRLQQSGPGLVKPSQTLSLTCAISGDSVFN | | QSALTQPASVSGSPGQSITISCTGTSSNIGT | |
| | NNAAWSWIRQSPSRGLEWLGRTYYRSKWLYD | | YKFVSWYQQHPDKAPKVLLYEVSKRPSGVSS | |
| | YAVTVKSRITVNPDTSRNQFTLQLTSVTPED | | RFSGSKSGNTASLTISGLQAEDQADYHCCSY | |
| | TALYYCARGYSSSFDYWGQGTLVTVSSASTK | | AGSGTLLFGGGTKLTVLGQPKAAPSVTLFPP | |
| | GPSVFPLAPSSKSTSGGTAALGCLVKDYFPE | | SSEELQANKATLVCLISDFYPGAVTVAWKAD | |
| | PVTVSWNSGALTSGVHTFPAVLQSSGLYSLS | | SSPVKAGVETTTPSKQSNNKYAASSYLSLTP | |
| | SVVTVPSSSLGTQTYICNVNHKPSNTKVDKK | | EQWKSHRSYSCQVTHEGSTVEKTVAPTECS | |
| | VEPKSCDKTHTCPPCPAPELLGGPSVFLFPP | | | |
| | KPKDTLMISRTPEVTCVVVDVSHEDPEVKFN | | | |
| | WYVDGVEVHNAKTKPREEQYNSTYRVVSVLT | | | |
| | VLHQDWLNGKEYKCKVSNKALPAPIEKTISK | | | |
| | AKGQPREPQVYTLPPSREEMTKNQVSLTCLV | | | |
| | KGFYPSDIAVEWESNGQPENNYKTTPPVLDS | | | |
| | DGSFFLYSKLTVDKSRWQQGNVFSCSVMHEA | | | |
| | LHNHYTQKSLSLSPGK | | | |
| CD3B313 | HC Peptide ID: CD3H218 | (638) | LC Peptide ID: CD3L125 | (649) |
| (BLW-3B4) | QVQLQQSGPGLVKPSQTLSLTCAISGDSVFN | | QSALTQPASVSGSPGQSITISCTGTSSNIGT | |
| | NNGAWSWIRQSPSRGLEWLGRTYYRSKWLYD | | YKFVSWYQQHPDKAPKVLLYEVSKRPSGVSS | |
| | YAVSVKSRITVNPDTSRNQFTLQLNSVTPED | | RFSGSKSGNTASLTISGLQAEDQADYHCCSY | |
| | TALYYCARGYSSSFDYWGQGTLVTVSSASTK | | AGSGTLLFGGGTKLTVLGQPKAAPSVTLFPP | |
| | GPSVFPLAPSSKSTSGGTAALGCLVKDYFPE | | SSEELQANKATLVCLISDFYPGAVTVAWKAD | |
| | PVTVSWNSGALTSGVHTFPAVLQSSGLYSLS | | SSPVKAGVETTTPSKQSNNKYAASSYLSLTP | |
| | SVVTVPSSSLGTQTYICNVNHKPSNTKVDKK | | EQWKSHRSYSCQVTHEGSTVEKTVAPTECS | |
| | VEPKSCDKTHTCPPCPAPELLGGPSVFLFPP | | | |
| | KPKDTLMISRTPEVTCVVVDVSHEDPEVKFN | | | |
| | WYVDGVEVHNAKTKPREEQYNSTYRVVSVLT | | | |
| | VLHQDWLNGKEYKCKVSNKALPAPIEKTISK | | | |
| | AKGQPREPQVYTLPPSREEMTKNQVSLTCLV | | | |
| | KGFYPSDIAVEWESNGQPENNYKTTPPVLDS | | | |
| | DGSFFLYSKLTVDKSRWQQGNVFSCSVMHEA | | | |
| | LHNHYTQKSLSLSPGK | | | |
| CD3B314 | HC Peptide ID: CD3H220 | (641) | LC Peptide ID: CD3L126 | (650) |
| (BLX-1F8) | QVQLQQSGPGLVKPSQTLSLTCAISGDSVFN | | QSALTQPASVSGSPGQSITISCTGTSSDIGT | |
| | NNAAWSWIRQSPSRGLEWLGRTYYRSKWLYD | | YKFVSWYQQHPDKAPKVLLYEVSKRPSGVSS | |
| | YAVSVKSRITVNPDTSRNQFTLQLKSVTPED | | RFSGSKSDNTASLTISGLQAEDQADYHCCSY | |
| | TALYYCSRGYSSSFDYWGQGTLVTVSSASTK | | AGSGTLLFGGGTKLTVLGQPKAAPSVTLFPP | |
| | GPSVFPLAPSSKSTSGGTAALGCLVKDYFPE | | SSEELQANKATLVCLISDFYPGAVTVAWKAD | |
| | PVTVSWNSGALTSGVHTFPAVLQSSGLYSLS | | SSPVKAGVETTTPSKQSNNKYAASSYLSLTP | |
| | SVVTVPSSSLGTQTYICNVNHKPSNTKVDKK | | EQWKSHRSYSCQVTHEGSTVEKTVAPTECS | |
| | VEPKSCDKTHTCPPCPAPELLGGPSVFLFPP | | | |
| | KPKDTLMISRTPEVTCVVVDVSHEDPEVKFN | | | |
| | WYVDGVEVHNAKTKPREEQYNSTYRVVSVLT | | | |
| | VLHQDWLNGKEYKCKVSNKALPAPIEKTISK | | | |
| | AKGQPREPQVYTLPPSREEMTKNQVSLTCLV | | | |
| | KGFYPSDIAVEWESNGQPENNYKTTPPVLDS | | | |
| | DGSFFLYSKLTVDKSRWQQGNVFSCSVMHEA | | | |
| | LHNHYTQKSLSLSPGK | | | |
| CD3B315 | HC Peptide ID: CD3H221 | (642) | LC Peptide ID: CD3L124 | (647) |
| (BLX-2E9) | QVQLQQSGPGLVKPSQTLSLTCAISGDSVFN | | QSALTQPASVSGSPGQSITISCTGTSRDIGT | |
| | NNAAWSWIRQSPSRGLEWLGRTYYRSKWLYD | | YKFVSWYQQHPDKAPKVLLYEVSKRPSGVSS | |
| | YAVSVKSRITVNPDTSRNQFTLQLNSVTPED | | RFSGSKSGNTASLTISGLQAEDQADYHCCSY | |
| | TALYYCVRGYSSSFDYWGQGTLVTVSSASTK | | AGSGTLLFGGGTKLTVLGQPKAAPSVTLFPP | |
| | GPSVFPLAPSSKSTSGGTAALGCLVKDYFPE | | SSEELQANKATLVCLISDFYPGAVTVAWKAD | |
| | PVTVSWNSGALTSGVHTFPAVLQSSGLYSLS | | SSPVKAGVETTTPSKQSNNKYAASSYLSLTP | |
| | SVVTVPSSSLGTQTYICNVNHKPSNTKVDKK | | EQWKSHRSYSCQVTHEGSTVEKTVAPTECS | |
| | VEPKSCDKTHTCPPCPAPELLGGPSVFLFPP | | | |
| | KPKDTLMISRTPEVTCVVVDVSHEDPEVKFN | | | |
| | WYVDGVEVHNAKTKPREEQYNSTYRVVSVLT | | | |
| | VLHQDWLNGKEYKCKVSNKALPAPIEKTISK | | | |
| | AKGQPREPQVYTLPPSREEMTKNQVSLTCLV | | | |
| | KGFYPSDIAVEWESNGQPENNYKTTPPVLDS | | | |
| | DGSFFLYSKLTVDKSRWQQGNVFSCSVMHEA | | | |
| | LHNHYTQKSLSLSPGK | | | |
| CD3B316 | HC Peptide ID: CD3H222 | (643) | LC Peptide ID: CD3L124 | (646) |
| (BLX-3F4) | QVQLQQSGPRLVRPSQTLSLTCAISGDSVFN | | | |
| | NNAAWSWIRQSPSRGLEWLGRTYYRSKWLYD | | QSALTQPASVSGSPGQSITISCTGTSSNIGT | |
| | YAVSVKSRITVNPDTSRNQFTLQLNSVTPED | | YKFVSWYQQHPDKAPKVLLYEVSKRPSGVSS | |
| | TALYYCARGYSSSFDYWGQGTLVTVSSASTK | | RFSGSKSGNTASLTISGLQAEDQADYHCCSY | |
| | GPSVFPLAPSSKSTSGGTAALGCLVKDYFPE | | AGSGTLLFGGGTKLTVLGQPKAAPSVTLFPP | |
| | PVTVSWNSGALTSGVHTFPAVLQSSGLYSLS | | SSEELQANKATLVCLISDFYPGAVTVAWKAD | |
| | SVVTVPSSSLGTQTYICNVNHKPSNTKVDKK | | SSPVKAGVETTTPSKQSNNKYAASSYLSLTP | |
| | VEPKSCDKTHTCPPCPAPELLGGPSVFLFPP | | EQWKSHRSYSCQVTHEGSTVEKTVAPTECS | |
| | KPKDTLMISRTPEVTCVVVDVSHEDPEVKFN | | | |
| | WYVDGVEVHNAKTKPREEQYNSTYRVVSVLT | | | |
| | VLHQDWLNGKEYKCKVSNKALPAPIEKTISK | | | |
| | AKGQPREPQVYTLPPSREEMTKNQVSLTCLV | | | |
| | KGFYPSDIAVEWESNGQPENNYKTTPPVLDS | | | |
| | DGSFFLYSKLTVDKSRWQQGNVFSCSVMHEA | | | |
| | LHNHYTQKSLSLSPGK | | | |
| CD3B317 | HC Peptide ID: CD3H223 | (644) | LC Peptide ID: CD3L124 | (648) |
| (BLX-3G8) | QVQLQQSGPGLVKPSQTLSLTCAISGDSVFN | | QSALTQPASVSGSPGQSITISCTGTSRDIGT | |
| | NNAAWSWIRQSPSRGLEWLGRTYYRSKWLYD | | YKFVSWYQQHPDKAPKVLLYEVNKRPSGVSS | |
| | YAVSVKSRITVNPDTSRNQFTLQLNSVTPED | | RFSGSKSGNTASLTISGLQAEDQADYHCCSY | |
| | TALYYCVRGYSSSFDYWGQGTLVTVSSASTK | | AGSGTLLFGGGTKLTVLGQPKAAPSVTLFPP | |
| | GPSVFPLAPSSKSTSGGTAALGCLVKDYFPE | | SSEELQANKATLVCLISDFYPGAVTVAWKAD | |
| | PVTVSWNSGALTSGVHTFPAVLQSSGLYSLS | | SSPVKAGVETTTPSKQSNNKYAASSYLSLTP | |
| | SVVTVPSSSLGTQTYICNVNHKPSNTKVDKK | | EQWKSHRSYSCQVTHEGSTVEKTVAPTECS | |
| | VEPKSCDKTHTCPPCPAPELLGGPSVFLFPP | | | |
| | KPKDTLMISRTPEVTCVVVDVSHEDPEVKFN | | | |
| | WYVDGVEVHNAKTKPREEQYNSTYRVVSVLT | | | |
| | VLHQDWLNGKEYKCKVSNKALPAPIEKTISK | | | |
| | AKGQPREPQVYTLPPSREEMTKNQVSLTCLV | | | |
| | KGFYPSDIAVEWESNGQPENNYKTTPPVLDS | | | |
| | DGSFFLYSKLTVDKSRWQQGNVFSCSVMHEA | | | |
| | LHNHYTQKSLSLSPGK | | | |

TABLE 7A
VH and VL sequences with HC and LC isotype of 7 monoclonal CD3 antibodies
from the first panel of 9 described above (see Table 3). All HC
isotypes were huIgG1_G1m(17). All LC isotypes were huLambda 2.

| Fab ID | Peptide ID | VH (SEQ ID NO:) | Peptide ID | VL (SEQ ID NO:) |
|---|---|---|---|---|
| CD3B311 | CD3H218 | qvqlqqsgpglvkpsqtlslt | CD3L123 | qsaltqpasvsgspggsitisct |
| | | caisgdsvfnnnaawswirqs | | gtsrdigtykfvswyqqhpdkap |
| | | psrglewlgrtyyrskwlydy | | kvllyevnkrpsgvssrfsgsks |
| | | avsvksritvnpdtsrnqftl | | gntasltisglqaedqadyhccs |
| | | qlnsvtpedtalyycvrgyss | | yagsgtllfgggtkltvl |
| | | sfdywgqgtlvtvss | | (658) |
| | | (651) | | |
| CD3B312 | CD3H219 | qvqlqqsgprlvrpsqtlslt | CD3L124 | qsaltqpasvsgspggsitisct |
| | | caisgdsvfnnnaawswirqs | | gtssnigtykfvswyqqhpdkap |
| | | psrglewlgrtyyrskwlydy | | kvllyevskrpsgvssrfsgsks |
| | | avsvksritvnpdtsrnqftl | | gntasltisglqaedqadyhccs |
| | | qlnsvtpedtalyycargyss | | yagsgtllfgggtkltvl |
| | | sfdywgqgtlvtvss | | (659) |
| | | (652) | | |
| CD3B313 | CD3H218 | qvqlqqsgpglvkpsqtlslt | CD3L124 | qsaltqpasvsgspggsitisct |
| | | caisgdsvfnnnaawswirqs | | gtsrdigtykfvswyqqhpdkap |
| | | psrglewlgrtyyrskwlydy | | kvllyevskrpsgvssrfsgsks |
| | | avsvksritvnpdtsrnqftl | | gntasltisglqaedqadyhccs |
| | | qlnsvtpedtalyycvrgyss | | yagsgtllfgggtkltvl |
| | | sfdywgqgtlvtvss | | (688) |
| | | (687) | | |
| CD3B314 | CD3H220 | qvqlqqsgpglvkpsqtlslt | CD3L126 | qsaltqpasvsgspggsitisct |
| | | caisgdsvfnnnaawswirqs | | gtssdigtykfvswyqqhpdkap |
| | | psrglewlgrtyyrskwlydy | | kvllyevskrpsgvssrfsgsks |
| | | avsvksritvnpdtsrnqftl | | dntasltisglqaedqadyhccs |
| | | qlksvtpedtalyycsrgyss | | yagsgtllfgggtkltvl |
| | | sfdywgqgtlvtvss | | (660) |
| | | (653) | | |
| CD3B315 | CD3H221 | qvqlqqsgpglvkpsqtlslt | CD3L124 | qsaltqpasvsgspggsitisct |
| | | caisgdsvfnnngawswirqs | | gtssnigtykfvswyqqhpdkap |
| | | psrglewlgrtyyrskwlydy | | kvllyevskrpsgvssrfsgsks |
| | | avsvksritvnpdtsrnqftl | | gntasltisglqaedqadyhccs |
| | | qlnsvtpedtalyycargyss | | yagsgtllfgggtkltvl |
| | | sfdywgqgtlvtvss | | (659) |
| | | (654) | | |
| CD3B316 | CD3H222 | qvrlqqsgpglvkpsqtlslt | CD3L124 | qsaltqpasvsgspggsitisct |
| | | caisgdsvfnnnaawswirqs | | gtssnigtykfvswyqqhpdkap |
| | | psrglewlgrtyyrskwlydy | | kvllyevskrpsgvssrfsgsks |
| | | avtvksritvnpdtsrnqftl | | gntasltisglqaedqadyhccs |
| | | qltsvtpedtalyycargyss | | yagsgtllfgggtkltvl |
| | | sfdywgqgtlvtvss | | (659) |
| | | (655) | | |
| CD3B317 | CD3H223 | qvqlqqsgpglvkpsqtlslt | CD3L124 | qsaltqpasvsgspggsitisct |
| | | caisgdsvfnnnaawtwirqs | | gtssnigtykfvswyqqhpdkap |
| | | psrglewlgrtyyrskwlydy | | kvllyevskrpsgvssrfsgsks |
| | | avsvksritvnpdtsrnqftl | | gntasltisglqaedqadyhccs |
| | | qlksvtpedtalyycsrgyss | | yagsgtllfgggtkltvl |
| | | sfdywgqgtlvtvss | | (659) |
| | | (656) | | |

TABLE 7B
CDR sequences with HC and LC isotype of 7 monoclonal CD3
antibodies from the first panel of 9 described above
(see Table 3). Sequences are defined according
to Kabat. All HC isotypes were huIgG1_G1m(17).
All LC isotypes were huLambda 2.

| | | CDRs (SEQ ID NO:) | | |
|---|---|---|---|---|
| FAB ID | Peptide ID | CDR1 | CDR2 | CDR3 |
| CB3B311 | HC | NNNAAWS | RTYYRSKWLYDYAVSVKS | GYSSSFDY |
| | CD3H218 | (662) | (663) | (664) |
| | LC | TGTSRDIGTYKFVS | EVNKRPS | CSYAGSGTLL |
| | CD3L123 | (667) | (669) | (670) |
| CD3B312 | HC | NNNAAWS | RTYYRSKWLYDYAVSVKS | GYSSSFDY |
| | CD3H219 | (662) | (663) | (664) |
| | LC | TGTSSNIGTYKFVS | EVSKRPS | CSYAGSGTLL |
| | CD3L124 | (671) | (673) | (670) |
| CD3B313 | HC | NNNAAWS | RTYYRSKWLYDYAVSVKS | GYSSSFDY |
| | CD3H218 | (662) | (663) | (664) |
| | LC | TGTSRDIGTYKFVS | EVSKRPS | CSYAGSGTLL |
| | CD3L124 | (672) | (673) | (670) |
| CD3B314 | HC | NNNAAWS | RTYYRSKWLYDYAVSVKS | GYSSSFDY |
| | CD3H220 | (662) | (663) | (664) |
| | LC | TGTSSDIGTYKFVS | EVSKRPS | CSYAGSGTLL |
| | CD3L126 | (674) | (673) | (670) |
| CD3B315 | HC | NNNGAWS | RTYYRSKWLYDYAVSVKS | GYSSSFDY |
| | CD3H221 | (665) | (663) | (664) |
| | LC | TGTSSNIGTYKFVS | EVSKRPS | CSYAGSGTLL |
| | CD3L124 | (671) | (673) | (670) |
| CD3B316 | HC | NNNAAWS | RTYYRSKWLYDYAVTVKS | GYSSSFDY |
| | CD3H222 | (662) | (689) | (664) |
| | LC | TGTSSNIGTYKFVS | EVSKRPS | CSYAGSGTLL |
| | CD3L124 | (671) | (673) | (670) |
| CD3B317 | HC | NNNAAWT | RTYYRSKWLYDYAVSVKS | GYSSSFDY |
| | CD3H223 | (666) | (663) | (664) |
| | LC | TGTSSNIGTYKFVS | EVSKRPS | CSYAGSGTLL |
| | CD3L124 | (671) | (673) | (670) |

[0628] 1-3 Screening of Hybridomas for Binding to Human and Cynomolgus Purified T Cells

[0629] A cell-based binding assay was designed to assess the binding capacity of individual rat hybridoma supernatants to human (FIG. 2) and cynomolgus (FIG. 3) purified CD3+ T lymphocytes. The T cells were counted, diluted to 1×10\hat{ }6 cells/mL and incubated with 0.5 ul/mL of Live/Dead Fixable Green Dead Cell Stain (Life Technologies, L-2301). Next the cells were aliquoted into a U-bottom (Falcon 353077) plate at 100 ul/well (1×10\hat{ }5 cells/well). The plates were centrifuged at 300 g for 5 minutes to pellet the cells and the supernatant removed. The plate was vortexed briefly to resuspend the cells. The hybridoma supernatants were diluted in FACS staining buffer (BSA, BD Biosciences 554657) to 4.5 μg/mL and then serially diluted 6 times at 1:3 dilutions to the lowest concentration of 0.006 μg/mL. A positive control of mouse anti-human CD3 (SP34-2, BD Biosciences 551916) and negative isotype control (mouse IgG1 BD Biosciences 556648) were also diluted to 4.5 μg/mL. 50 μl of each sample was added to the T cells and incubated at 4° C. for 1 hour. The cells were washed once with staining buffer and secondary AF647 Goat anti-mouse IgG (Life Technologies, A21235) or AF647 goat anti-rat IgG (Life Technologies, A21247) was added at 10 μg/mL in 50 μl was added according to the appropriate species (anti-rat for hybridoma samples and anti-mouse for the control antibodies). The plates were incubated at 4° C. for 45 minutes and washed with staining buffer twice. The cells were resuspended in 25 μl of running buffer (staining buffer+1 mM EDTA (Life technologies, AM9260G)+0.1% pluronic F-68 (Life Technologies 24040-032)) and read on the Intellicyt system (Intellicyt Corp.). The results are shown in FIGS. 2 and 3.

[0630] In other experiments, purified human T cells were plated at 1.1×10\hat{ }5 cells/well in U-bottom plates. The plates were centrifuged at 300 g for 5 minutes to pellet the cells and the supernatant removed. The plate was vortexed briefly to resuspend the cells. The hybridoma supernatants were diluted in FACS staining buffer (BSA, BD Biosciences 554657) to 30 ug/mL and then serially diluted 11 times at 1:3 dilutions to the lowest concentration of 0.00017 ug/mL. 50 ul of each sample was added to the T cells and incubated at 4 C for 1 hour. The cells were washed once with staining buffer and secondary Dylight 650 goat anti-rat IgG (Bethyl, A110-239D5) was added at 10 ug/mL in 50 ul was added. The plates were incubated at 4 C for 1 hour and washed with staining buffer twice. The cells were resuspended in 30 ul of FACS buffer and read on the Hypercyte flow cytometer (Intellicyt Corp.). Representative dose-response curves for the anti-CD3 clones binding to primary human T cells are shown in FIG. 5.

[0631] Representative competition binding curves with SP34-2 (a commercial anti-human CD3 antibody which has a known epitope and is cross-reactive with cynomolgus CD3) are shown in FIG. 6. The initial screening results are summarized in Table 8. Six of the clones showed positive binding and also compete with SP34-2 for binding to primary human T cells.

[0632] 1-4 Competition Assay with SP34-2 Commercial CD3 Antibody

[0633] The hybridoma supernatants were also assessed for their ability to compete with commercial anti-human CD3 antibody SP34-2 which has a known epitope and is cross-reactive with cynomolgus CD3. First a concentration titration curve of AF488 fluorescently labelled SP34-2 (BD, 557705) was performed to determine a fixed concentration of SP34-2 for the following competition assays. Briefly, human purified T cells were diluted to 1×10\hat{ }6 cell/mL in PBS. Fc block (Human TruStain Fc Block, Biolegend, 422302) was added at 5 μL/100 μL cells and plated at 100 μL/well in U-bottom plates. AF488 SP34-2 and the AF488 labelled isotype control (AF488 mouse IgG1, BD, 400129) were serially diluted from 50 μg/mL to 0.049 μg/mL in a 1:2 dilution scheme. The plates were centrifuged at 300×g for 5 minutes to pellet the cells and the supernatant removed. The plate was gently vortexed briefly to resuspend the cells. 50 μL of each AF488 SP34-2 dilution was added to the cells and incubated at 4 C for 1 hour. The plates were washed with staining buffer twice and once with running buffer (staining buffer+1 mM EDTA (Life technologies, AM9260G)+0.1% pluronic F-68 (Life Technologies 24040-032)). The cells were resuspended in 25 μL of running buffer and read on the HTFC Screening System (IntelliCyt Corporation). Based on the dose response curve, a fixed concentration of 2 ug/mL SP34-2 was chosen for the competition assay.

[0634] Seven hybridomas that demonstrated binding to purified T cells were assayed for competition with SP34-2 binding to human T cells (FIG. 4). Control antibodies were included in the competition assay. Unlabeled Mouse Anti-Human CD3, SP34-2 antibody and Mouse Anti-Human CD3, UCHT1 antibody were used as positive controls and rat IgG and Mouse isotype were used as negative controls for AF488 labeled SP34-2. Purified human T cells were diluted to a concentration of 1×10\hat{ }6 cells/mL in PBS. Fc block at 5 μL per 100 μL cells (Human TruStain Fc Block, Biolegend, 422302) and Live/Dead Fixable Far Red Dead Cell Stain at 0.5 μL per mL cells (Life Technologies L10120) were added to the cells and incubated for 15 minutes at 4° C.

[0635] Next, 10⁵ cells per well (1×10\hat{ }5 cells/well) were aliquoted into a 96-well U-bottom plate (Falcon 353077). The plates were centrifuged at 300×g for 5 minutes to pellet the cells and the supernatant removed. The plate was gently vortexed briefly to resuspend the cells. The hybridoma supernatants and the control antibodies were diluted in FACS staining buffer (BSA, BD Biosciences 554657) at 2× the desired final concentration. 35 μL of the 2× hybridoma supernatants and the control antibodies were mixed with 35 uL of 2×AF488 SP34-2 (4 μg/mL) to give the desired 1× concentration of hybridoma supernatants, 1× concentration of control antibodies and 2 μg/mL AF488 SP34-2. The hybridoma supernatants and control antibodies were assayed using a 7-point titration with a concentration range. Hybridoma supernatants were assayed from 200 μg/mL to 0.08 μg/mL and control antibodies were assayed from 100 μg/mL to 0.04 μg/mL. 50 uL of the 1× hybridoma supernatants or 1× control antibodies with 2 μg/mL AF488 SP34-2 were added to the T cells and incubated at 4° C. for 2 hours. The plates were washed with staining buffer twice and once with running buffer (staining buffer+1 mM EDTA (Life technologies, AM9260G)+0.1% pluronic F-68 (Life Technologies 24040-032)). The cells were resuspended in 25 μL of running buffer and read on the HTFC Screening System (IntelliCyt Corporation). Representative competition binding curves with SP34-2 (a commercial anti-human CD3 antibody which has a known epitope and is cross-reactive with cynomolgus CD3) are shown in FIG. 4 and FIG. 6. The initial screening results are summarized in Table 8. Six of the clones showed positive binding and also competed with SP34-2 for binding to primary human T cells.

[0636] As shown in FIG. 4 the seven antibodies competed with SP34-2 with similar curves. The right shift of the curves relative to the control SP34-2 indicates a weaker binding affinity. The isotype control rat IgG did not compete with SP34-2, as expected.

TABLE 8
Summary of anti-CD3 antibody binding on primary human
T cells. Anti-CD3 clones BLX-4E5, BLX-5H7, BLX-8B4,
BLX-8B6, BLX-8G8 and BLW-1E3 were positive for binding
to human T cells and competed with SP34-2 binding

| Ab clone | Binds with human T cells | Competes with SP34-2 |
|---|---|---|
| BLW-2B4 | + | + |
| BLW-2E6 | + | + |
| BLW-3B4 | + | + |
| BLX-1F8 | + | + |
| BLX-2E9 | + | + |
| BLX-3F4 | + | + |
| BLX-3G8 | + | + |
| BLX-1G10 | − | − |
| BLX-3H6 | − | − |
| BLX-4E5 | + | + |
| BLX-5H7 | + | + |
| BLX-8B4 | + | + |
| BLX-8B6 | + | + |
| BLX-8G8 | + | + |
| BLW-1E3 | + | + |
| BLW-1F1 | + | − |
| BLW-2C4 | − | − |
| BLW-2C11 | − | − |
| BLW-2F9 | − | − |
| BLW-3B5 | − | − |
| BLW-3H5 | − | − |

[0637] 1-5 Screening of Hybridoma Hits for T Cell Activation as Measured by CD69 Upregulation

[0638] A primary human and cynomolgus monkey T cell based assay was used to determine the capacity of the hybridoma hits to activate T cells. This was accomplished by coating antibodies to a plate to mimic the cross-linking effect of TCR activation. Upon activation, T cells are known to upregulate the surface expression of the protein, CD69. The experiment was conducted by coating 50 μl of a 10 μg/ml antibody preparation with unknown samples or controls (positive control: in house, Okt-3 BISB264.002, BD Bioscience SP-34-2 #551916; negative control: anti-CD20 in house BISB266.004) to a 96 well plate (Costar #3361). The plates were incubated overnight at 4° C. The next day the plates were washed twice with PBS. Frozen primary T cells (human sourced from Biological Specialities or Hemacare; cynomolgus sourced from WorldWide Primates) were thawed, counted for viability and resuspended at 2×10⁶ cell/ml in RPMI 1640 medium (Gibco #11875 with 10% HI FBS (Gibco #10062). 100 μl of the cells was added to the plate and incubated overnight (approximately 16 hours) at 37 C, 5% CO2. The following day the plates were spun at 1300 rpm for 3 minutes to pellet the cells and the supernatants were discarded. The cells were washed once in PBS and spun as before. 10 μl of a 2.5% solution of Live/Dead Green Fixable Dye (Life Technologies # L23101) in PBS was added to each well and incubated at room temperature and in the dark for 10 minutes. Next 50 μl of a 1% solution of anti-CD69 AF488 (Biolegend #310916 lot # B125271) in FACS buffer (BD Biosciences #554657) was added and the plates were incubated for 45 minutes at 4° C. The plates were washed twice by pelleting the cells as before and discarding the supernatant and resuspending in 150 μl of FACS buffer. After the final wash the cells were resuspended in 150 μl of FACS buffer and read on the FACS Canto. As seen in FIG. 20, the positive controls cOkt3 and SP34-2 induced the upregulation of CD69 on human T cells as indicated by the measured mean fluorescence intensity of the anti-CD69 staining. Only SP34-2 induced CD69 expression in the cynomolgus T cells, as it binds to a region of CD3 sequence that is conserved from monkey to man. The OKT3 anti-CD3 clone did not bind cynomolgus CD3 and did not induce CD69 upregulation. The negative control in both human and cynomolgus T cells was an anti-CD20 which is not expressed on T cells. Of the hybridoma clones that were tested for T cell activation, several induced CD69 expression to a similar degree as the positive control, namely 2B4, 2E6, 3B4, 1F8, 2E9, 3F4, 3G8, 4E5, 5H7, 8B4, 8G8 and 1F1. Most also bound and activated cynomolgus T cells except for 5H7, 8B4, and 8G8.

[0639] 1-6 Framework Engineering of BLW-2E6

[0640] Clones showed high homology and carried framework mutations comparing to human immunoglobulin germline sequences (FIGS. 1A and 1B). Clone 2E6 was selected to adapt the standard framework sequence. All 6 mutations on HC and 7 mutations on LC were mutated back to human germline sequence, either individually or combined (Table 9). The mutated V-region DNA sequences were synthesized and cloned into the same mammalian expression vectors as their parental constructs. The HC and LC constructs were paired via matrix format to generate proteins carrying individual or combinatorial mutations and protein activity was tested. V48 on LC could not be changed back to germline. All other back mutations were not critical but reduced activity to some degree.

TABLE 9
BLW-2E6 framework variants.

| | peptide ID |
|---|---|
| Heavy chain back mutation to human germline | |
| WT | CD3H219 |
| R10G | CD3H225 |
| R13K | CD3H226 |
| V73I | CD3H227 |
| R79K | CD3H228 |
| T83S | CD3H229 |
| L96V | CD3H230 |
| R10G/R13K/V73I/R79K/T83S/L96V | CD3H231 |
| Light chain back mutation to human germline | |
| WT | CD3L124 |
| D43G | CD3L128 |
| V48L | CD3L129 |
| L49M | CD3L130 |
| L50I | CD3L131 |
| S62N | CD3L132 |
| Q85E | CD3L133 |
| H89Y | CD3L134 |
| D43G/L49M/L50I/S62N/Q85E | CD3L135 |
| D43G/L49M/L50I/S62N/Q85E/H89Y | CD3L137 |
| D43G/V48L/L49M/L50I/S62N/Q85E/H89Y | CD3L136 |
| D43G/L49M/L50I/S62N/Q85E/H89Y/C91V | CD3L197 |

[0641] Framework mutations were engineered to one hybridoma clone, BLW-2E6, resulting in 80 mutant clones, some of which are indicated in Table 10. The 80 mutant clones were assayed for binding to primary human T cells (FIGS. 7 and 8). The T cells were counted, diluted to 1×10\hat{ }6 cells/mL and incubated with 5 μL Fc block (Human TruStain Fc Block, Biolegend, 422302) per 100 μL cells and 0.5 μl per mL of Live/Dead Fixable Green Dead Cell Stain (Life Technologies, L-2301) per 100 μL cells. Next, the cells were aliquoted into a 96-well U-bottom plate (Falcon 353077) at 100 μL/well (1×10\hat{ }5 cells/well). The plates were centrifuged at 300×g for 5 minutes to pellet the cells and the supernatant removed. The plate was gently vortexed briefly to resuspend the cells. The hybridoma supernatants were diluted in FACS staining buffer (BSA, BD Biosciences 554657) to 7.5 μg/mL, 1.5 ug/mL, 0.3 μg/mL, and 0.06 μg/mL. 50 μL of each sample was added to the T cells and incubated at 4° C. for 1 hour. The cells were washed once with staining buffer, and 50 μL of 5 μg/mL secondary AF647 goat anti-Human IgG F(ab′)2 (Jackson ImmunoResearch catalog 109-605-097) was added to the cells. The plates were incubated at 4° C. for 45 minutes and washed with staining buffer twice and once with running buffer (staining buffer+1 mM EDTA (Life technologies, AM9260G)+0.1% pluronic F-68 (Life Technologies 24040-032)). The cells were resuspended in 25 μL of running buffer and read on the HTFC Screening System (IntelliCyt Corporation). The results demonstrate that a change in the LC at position 48 abolished binding so that mutation was not carried forward. A slight reduction in binding was seen in the HC with all positions returned to germline (CD3H231).

[0642] 1-7 C91 Scanning of BLW-2E6 LC

[0643] Clone 2E6 and its derivatives expressed poorly and protein aggregation was observed. One residue, C91 of light chain, was predicted to have post-translational modification (PTM) risk and was mutated to all other possible amino acids to improve protein stability (Table 10). The mutated V-region DNA sequences were synthesized and cloned into the same human lambda expression vector as their parental construct. The SPR results demonstrated a change to valine or leucine at position 91 did not dramatically alter binding affinity. This change was also incorporated into wild type sequence and the framework adaptation above resulting in antibodies CD3B376 (CD3H219/CD3L150) and CD3B450 (CD3H231/CD3L197). CD3B376 and CD3B450 were cloned as IgG4PAA (IgG4 with S228P, F234A, L235A mutations).

[0644] Sequence information for CD3B376 is provided below:

CD3H219 HC amino acid sequence (SEQ ID NO: 640):
QVQLQQSGPRLVRPSQTLSLTCAISGDSVFNNNAAWSWIRQSPSRGLEWLGRTYYRSKWLYDYAVSVKSRITVN
PDTSRNQFTLQLNSVTPEDTALYYCARGYSSSFDYWGQGTLVTVSSASTKGPSVFPLAPCSRSTSESTAALGCL
VKDYFPEPVTVSWNSGALTSGVHTFPAVLQSSGLYSLSSVVTVPSSSLGTKTYTCNVDHKPSNTKVDKRVESKY
GPPCPPCPAPEAAGGPSVFLFPPKPKDTLMISRTPEVTCVVVDVSQEDPEVQFNWYVDGVEVHNAKTKPREEQF
NSTYRVVSVLTVLHQDWLNGKEYKCKVSNKGLPSSIEKTISKAKGQPREPQVYTLPPSQEEMTKNQVSLTCLVK
GFYPSDIAVEWESNGQPENNYKTTPPVLDSDGSFLLYSKLTVDKSRWQEGNVFSCSVMHEALHNHYTQKSLSLS
LGK
CD3H219 HC nucleic acid sequence (SEQ ID NO: 712)
caggtgcagctgcagcagtctggccctagactcgtgcggccttcccagaccctgtctctgacctgtgccatctc
cggcgactccgtgttcaacaacaacgccgcctggtcctggatccggcagagcccttctagaggcctggaatggc
tgggccggacctactaccggtccaagtggctgtacgactacgccgtgtccgtgaagtcccggatcaccgtgaac
cctgacacctcccggaaccagttcaccctgcagctgaactccgtgacccctgaggacaccgccctgtactactg
cgccagaggctactcctcctccttcgactattggggccagggcaccctcgtgaccgtgtcctct
CD3L150 LC amino acid sequence (SEQ ID NO: 676):
QSALTQPASVSGSPGQSITISCTGTSSNIGTYKFVSWYQQHPDKAPKVLLYEVSKRPSGVSSRFSGSKSGNTAS
LTISGLQAEDQADYHCVSYAGSGTLLFGGGTKLTVLGQPKAAPSVTLFPPSSEELQANKATLVCLISDFYPGAV
TVAWKADSSPVKAGVETTTPSKQSNNKYAASSYLSLTPEQWKSHRSYSCQVTHEGSTVEKTVAPTECS
CD3L150 LC nucleic acid sequence (SEQ ID NO: 713)
cagtctgctctgacccagcctgcctccgtgtctggctctcccggccagtccatcaccatcagctgtaccggcac
ctcctccaacatcggcacctacaagttcgtgtcctggtatcagcagcaccccgacaaggcccccaaagtgctgc
tgtacgaggtgtccaagcggccctctggcgtgtcctccagattctccggctccaagtctggcaacaccgcctcc
ctgaccatcagcggactgcaggctgaggaccaggccgactaccactgtgtgtcctacgctggctctggcaccct
gctgtttggcggaggcaccaagctgaccgtgctg
VH amino acid sequence of CD3H219 (SEQ ID NO: 652):
qvqlqqsgprlvrpsqtlsltcaisgdsvfnnnaawswirqspsrglewlgrtyyrskwlydyavsvksritvn
pdtsrnqftlqlnsvtpedtalyycargysssfdywgqgtlvtvss
VL amino acid sequence of CD3L150 (SEQ ID NO: 661):
qsaltqpasvsgspgqsitisctgtssnigtykfvswyqqhpdkapkvllyevskrpsgvssrfsgsksgntas
ltisglqaedqadyhcVsyagsgtllfgggtkltvl
HCDR1 of CD3H219 (SEQ ID NO: 662): NNNAAWS
HCDR2 of CD3H219 (SEQ ID NO: 663): RTYYRSKWLYDYAVSVKS
HCDR3 of CD3H219 (SEQ ID NO: 664): GYSSSFDY
LCDR1 of CD3L150 (SEQ ID NO: 671): TGTSSNIGTYKFVS
LCDR2 of CD3L150 (SEQ ID NO: 673): EVSKRPS
LCDR3 of CD3L150 (SEQ ID NO: 690): VSYAGSGTLL

[0645] Sequence information for CD3B450 is provided below:

CD3H231 HC amino acid sequence (SEQ ID NO: 675):
QVQLQQSGPGLVKPSQTLSLTCAISGDSVFNNNAAWSWIRQSPSRGLEWLGRTYYRSKWLYDYAVSVKSRITIN
PDTSKNQFSLQLNSVTPEDTAVYYCARGYSSSFDYWGQGTLVTVSSASTKGPSVFPLAPCSRSTSESTAALGCL
VKDYFPEPVTVSWNSGALTSGVHTFPAVLQSSGLYSLSSVVTVPSSSLGTKTYTCNVDHKPSNTKVDKRVESKY
GPPCPPCPAPEAAGGPSVFLFPPKPKDTLMISRTPEVTCVVVDVSQEDPEVQFNWYVDGVEVHNAKTKPREEQF
NSTYRVVSVLTVLHQDWLNGKEYKCKVSNKGLPSSIEKTISKAKGQPREPQVYTLPPSQEEMTKNQVSLTCLVK
GFYPSDIAVEWESNGQPENNYKTTPPVLDSDGSFLLYSKLTVDKSRWQEGNVFSCSVMHEALHNHYTQKSLSLS
LGK
CD3H231 HC nucleic acid sequence (SEQ ID NO: 714):
caggtgcagctgcagcagagcggccccggcctggtcaagcccagccagaccctgagcctgacctgcgccatcag
cggcgacagcgtgttcaacaacaacgccgcctggtcctggatccgccagagccccagccgcggcctggagtggc
tgggccgcacctactaccgcagcaagtggctgtacgactacgccgtgtccgtgaagtcccgcatcaccatcaac
cccgacaccagcaagaaccagttctccctgcagctgaacagcgtgacccccgaggacaccgccgtgtactactg
cgcccgcggctacagcagcagcttcgactactggggccagggcaccctggtcaccgtgtccagc
CD3L197 LC amino acid sequence (SEQ ID NO: 677):
QSALTQPASVSGSPGQSITISCTGTSSNIGTYKFVSWYQQHPGKAPKVMIYEVSKRPSGVSNRFSGSKSGNTAS
LTISGLQAEDEADYYCVSYAGSGTLLFGGGTKLTVLGQPKAAPSVTLFPPSSEELQANKATLVCLISDFYPGAV
TVAWKADSSPVKAGVETTTPSKQSNNKYAASSYLSLTPEQWKSHRSYSCQVTHEGSTVEKTVAPTECS
CD3L197 LC nucleic acid sequence (SEQ ID NO: 715):
Cagtctgctctgacccagcctgcctccgtgtctggctctcccggccagtccatcaccatcagctgtaccggcac
ctcctccaacatcggcacctacaagttcgtgtcctggtatcagcagcaccccggcaaggcccccaaagtgatga
tctacgaggtgtccaagcggccctccggcgtgtccaacagattctccggctccaagtccggcaacaccgcctcc
ctgacaatcagcggactgcaggccgaggacgaggccgactactactgtgtgtcctacgccggctctggcaccct
gctgtttggcggcggaacaaagctgaccgtgctg
VH amino acid sequence of CD3H231 (SEQ ID NO: 657):
qvqlqqsgpglvkpsqtlsltcaisgdsvfnnnaawswirqspsrglewlgrtyyrskwlydyavsvksritin
pdtsknqfslqlnsvtpedtavyycargysssfdywgqgtlvtvss
VL amino acid sequence of CD3L197 (SEQ ID NO: 678):
QSALTQPASVSGSPGQSITISCTGTSSNIGTYKFVSWYQQHPGKAPKVMIYEVSKRPSGVSNRFSGSKSGNTAS
LTISGLQAEDEADYYCVSYAGSGTLLFGGGTKLTVL
HCDR1 of CD3H231 (SEQ ID NO: 662): NNNAAWS
HCDR2 of CD3H231 (SEQ ID NO: 663): RTYYRSKWLYDYAVSVKS
HCDR3 of CD3H231 (SEQ ID NO: 664): GYSSSFDY
LCDR1 of CD3L197 (SEQ ID NO: 671): TGTSSNIGTYKFVS
LCDR2 of CD3L197 (SEQ ID NO: 673): EVSKRPS
LCDR3 of CD3L197 (SEQ ID NO: 690): VSYAGSGTLL

TABLE 10
Engineered variants of BLW-2E6 LC by C91 scanning

| C91 scanning | peptide ID |
|---|---|
| CD3 2E6 LC | CD3L124 |
| CD3 2E6 LC, C91S | CD3L146 |
| CD3 2E6 LC, C91G | CD3L147 |
| CD3 2E6 LC, C91E | CD3L148 |
| CD3 2E6 LC, C91D | CD3L149 |
| CD3 2E6 LC, C91V | CD3L150 |
| CD3 2E6 LC, C91A | CD3L151 |
| CD3 2E6 LC, C91R | CD3L152 |
| CD3 2E6 LC, C91K | CD3L153 |
| CD3 2E6 LC, C91N | CD3L154 |
| CD3 2E6 LC, C91M | CD3L155 |
| CD3 2E6 LC, C91I | CD3L156 |
| CD3 2E6 LC, C91T | CD3L157 |
| CD3 2E6 LC, C91W | CD3L158 |
| CD3 2E6 LC, C91Y | CD3L159 |
| CD3 2E6 LC, C91L | CD3L160 |
| CD3 2E6 LC, C91F | CD3L161 |
| CD3 2E6 LC, C91Q | CD3L162 |
| CD3 2E6 LC, C91H | CD3L163 |
| CD3 2E6 LC, C91P | CD3L164 |

[0646] 1-8 Binding of BLW-2E6 CD3 mAbs to hCD3ε Construct by ProteOn SPR

[0647] The binding of BLW-2E6 anti-CD3 mAbs with point mutations on the light and/or heavy chain(s) to a recombinant human CD3ε(1-27) peptide with a C-terminal Tencon25 fusion (Janssen production, referred as hCD3ε(1-27)-Tn25) was measured by ProteOn SPR (Bio-Rad). Goat anti-human Fc IgG (Jackson Immunoresearch, Cat #109-005-098) was directly immobilized via amine coupling at 30 μg/mL in acetate buffer, pH 5.0 on all 6 ligand channels in vertical orientation on GLC Sensor Chip (Bio-Rad, catalog no. 176-5011) with a flow rate of 30 L/min in PBS containing 0.005% Tween-20. The immobilization densities averaged about 6000 Response Units (RU) with less than 5% variation among different channels. Five different mAbs were captured on the anti-human Fc IgG surface at 1.5 ug/ml (1000˜1250 RU) in vertical ligand orientation, with the 6th ligand channel as no ligand surface control. The hCD3ε(1-27)-Tn25 at 1 μM concentration in 3-fold dilution series of 5 concentrations flew in as analyte to bind to captured mAbs in the horizontal orientation. A 6^{th} buffer sample was also injected to monitor the dissociation of captured mAb and baseline stability. The dissociation phase for all concentrations of hCD3ε(1-27)-Tn25 was monitored at a flow rate of 100 μL/min for 30 minutes. The binding surface was regenerated for the next interaction cycle using a 18 second pulse of 0.8% phosphoric acid to remove the antigen and the bound mAb. The raw data were processed by subtracting two sets of reference data from the response data: 1) the inter-spot signals to correct for the non-specific interactions between the Ag and the empty chip surface; 2) the buffer channel signals to correct for baseline drifting due to the dissociation of captured mAb surface over time. The processed data at all concentrations for each mAb were globally fit to a 1:1 simple Langmuir binding model to extract estimates of the kinetic (kₒₙ, k_{off}) and affinity (K_{D}) constants. Results are provided in FIG. 11.

TABLE 11
Summary of the kinetics/affinities of BLW-2E6 variants binding to hCD3ε(1-27)-Tn25 (N = 1)

| Protein | Heavy | Light | ka | kd | KD | | |
|---|---|---|---|---|---|---|---|
| AA ID | Chain | Chain | (1/Ms) | (1/s) | (nM) | HC Mutation(s) | LC mutation(s) |
| C3B312 | CD3H219 | CD3L124 | 9.08E+04 | 1.87E−03 | 20.6 | Wild type | Wild type |
| CD3B376 | CD3H219 | CD3L150 | 1.02E+05 | 2.37E−03 | 23.3 | Wild type | C91V |
| N/A | CD3H219 | CD3L160 | 9.84E+04 | 4.05E−03 | 41.1 | Wild type | C91L |
| N/A | CD3H219 | CD3L137 | 6.13E+04 | 2.02E−03 | 32.9 | Wild type | D43G/L49M/L50I/ |
| | | | | | | | S62N/Q85E/H89Y |
| CD3B334 | CD3H231 | CD3L137 | 6.96E+04 | 5.54E−03 | 79.6 | R10G/R13K/V73I/ | D43G/L49M/L50I/ |
| | | | | | | R79K/T83S/L96V | S62N/Q85E/H89Y |

N/A = not assigned

[0648] 1-9 Binding of Anti-CD3 Monoclonal Antibodies to Human T Cells

[0649] In vitro binding affinity of CD3B376 and CD3B450 to human T cells was determined by flow cytometry after crossing with antigen specific target arm. A preliminary study was carried out on human T cells to determine the saturation binding constant of an anti-CD3 tracer molecule (KdT). A fixed concentration of the tracer ([T]) was then used in a competition binding assay with titrated concentrations of the test mAbs. The IC50 (concentration at which 50% inhibition is achieved) value of the test molecule was used to determine the binding affinity (Kd) using the following formula: K_{d}=IC50/(1+([T]/K_{d}T)). Five human donors were used to determine the saturation binding constant (K_{d}T) of the tracer, a commercially available AlexaFluor488 SP34-2 anti-CD3 (BioScience #557705) (data not shown).

[0650] Determining Saturation Binding Constant of Tracer (K_{d}T)

[0651] Methods: Human pan T cells were cryogenically-stored in nitrogen tanks until used. T cells were thawed, washed with PBS, re-suspended in FACS Staining buffer, counted (with viability noted), and re-suspended at 0.5×10\hat{ }6 cells/mL. Far Red Live/Dead stain (Life Technologies, AKA Invitrogen # L34974) (50 μL of DMSO into a vial) was added at 1 μL per 1×10\hat{ }6 cells; and FcR blocker (Miltenyi Biotec #130-059-901) (1 mL of a 1:20 dilution per 0.5×10\hat{ }6 cells) were added to the cells for 10 minutes each. Cells were plated at 50,000 cells/well and washed. Increasing concentrations of the AlexaFluor488 SP-34 anti-CD3 were added to the T cells for 2 hours at 4° C. Cells were washed to remove un-bound antibody, fixed for 15 minutes, washed, and re-suspended in FACS Staining buffer containing 1 mM EDTA.

[0652] The iQue Intellicyte Flow Cytometer was used to measure binding. Cells were gated for T cell population, followed by cell singlets, followed by Live Cells (FL4). Geometric mean of staining (FL1) was determined for each well.

[0653] The acquired mean fluorescence intensity values were plotted as a function of the antibody molecule concentration and analyzed using Prism software in a one-site binding analysis (Total Binding) (FIG. 9). The software calculates the corresponding K_{d} value that describes the binding of the antibody molecule to a receptor (the CD3 on Human Pan T cells) that follows the law of mass action. The formula is as follows: Y=(Bₘₐₓ×X)/(K_{d}+X); where: Bmax is maximal binding; K_{d} is the concentration of ligand required to reach half-maximal binding.

[0654] Results: K_{d} values were derived for each donor, and the mean value obtained. The Saturation Binding Constant (K_{d}T) for human T-Cells was derived to be 5.6±1.0 nM (n=4) and was used in the previously mentioned formula to determine K_{d} binding affinities.

[0655] Determining Binding Affinity of Anti-CD3 mAbs by Competition Assay

[0656] Methods: Competition binding studies were performed using bivalent antibodies against CD3:
[0657] Anti CD3 bivalents: CD3B376 and CD3B450 (FIG. 10)

[0658] Human pan T cells were used to determine the binding affinity of the test mAbs. The tracer used was the commercially available AlexaFluor488 SP-34 anti-CD3 (BioScience #557705) and the saturation binding constant for this tracer is described above.

[0659] T cells were cryogenically-stored in nitrogen tanks until used. T cells were thawed, washed with PBS, re-suspended in FACS Staining buffer, counted with viability noted, and re-suspended at 0.5×10⁶ cells/mL. Far Red Live/Dead stain (Life Technologies, AKA Invitrogen # L34974) (50 μL of DMSO into a vial) was added at 1 μL per 1×10\hat{ }6 cells; and FcR blocker (Miltenyi Biotec #130-059-901) (1 mL of a 1:20 dilution per 0.5×10\hat{ }6 cells) was added to the cells for 10 minutes each. Cells were plated at 50,000 cells/well and washed.

[0660] The mAbs (and isotype control), were serially diluted 1:2 from a starting concentration of 1000 or 200 μg/mL (2×), and a fixed concentration of the tracer (5 μg/mL; 2×) was mixed together to give 1× concentrations. Therefore, the final (1×) concentration of the tracer was 2.5 g/mL=16.6 nM. The mixture was added to the T cells for 2 hours at 4° C. Cells were then washed to remove un-bound antibody, fixed for 15 minutes, washed, and re-suspended in FACS Staining buffer containing 1 mM EDTA.

[0661] The iQue Intellicyte Flow Cytometer was used to measure binding. Cells were gated for T-cell population, followed by cell singlets, followed by Live Cells (FL4). Geometric mean of staining (FL1) was determined for each well. The acquired mean fluorescence intensity values were plotted as a function of the log antibody molecule concentration (converted to nM) and analyzed using Prism software in a sigmoidal dose-response (variable slope) from which the EC50/IC50 values (in nM) are derived. The binding affinity (K_{d}) was derived using the following formula: K_{d}=IC50/(1+([T]/K_{d}T)). Where: K_{d} is the affinity of the competitor (unlabeled molecule); IC50 in nM of the test compound; [T] is concentration of the tracer (16.6 nM); K_{d}T is the K_{d} of the tracer determined by saturation binding (5.6 nM for human).

[0662] Production of Monoclonal and Bispecific Antibodies

[0663] The bispecific CD3 antibodies of the present invention may be generated through controlled Fab-arm exchanged (FAE) as described in Labrijn et al., 2013, PNAS, vol. 110(13): 5145-5150; PCT Publ. WO 2011/131746; or in Labrijn et al., 2014, Nat Protoc, 9(10):2450-63. Briefly, in this in vitro method, two full-length parental bivalent antibodies are provided, each comprising a mutation in the antibody CH3 region that favors heterodimer formation resulting in bispecific antibodies containing a half-arm from each parental antibody. Mutations that may be used to favor heterodimer formation are F405L in one parental antibody and R409K in the other prental antibody for IgG1 antibodies, or F405L and K409R one parental antibody while retaining wild-type CH3 for IgG4 antibodies.

[0664] The monospecific antibodies were expressed in HEK cell lines under CMV promoters.

[0665] The parental antibodies were purified using a protein A column with an elution buffer of 100 mM NaAc pH3.5 and a neutralization puffer of 2M Tris pH 7.5 and 150 mM NaCl. The mabs were desalted using PD10 (Sephadex G25M) column and dialyzed intoD-PBS, pH 7.2 buffer.

[0666] Post purification the parental antibodies were mixed under reducing conditions in 75 mM cysteamine-HCl and incubated at 31° C. for 4 h. The recombination reactions were based on molar ratios, where a set amount of target parent (eg, 10 mg, or ˜71.8 nanomoles) was combined with CD3 antibody (eg, ˜67.8 nanomoles), where the target parent antibody was added in a 6% excess of the CD3 antibody. The recombinations were subsequently dialyzed against PBS to remove the reductant. The bispecific antibody reactions were performed with an excess of the target parent antibody (ratio) to minimize the amount of unreacted CD3 parental antibody remaining after recombination. Following the partial reduction of the parental mAbs, the reductant was removed via overnight dialysis into PBS.

[0667] Results: FIG. 10 shows the inhibition curves for the bivalent and monovalent anti CD3 constructs, CD3B376 and CD3B450, competing for binding against the AlexaFluor488 SP-34 anti CD3 tracer antibody. Increasing concentrations of the test anti CD3 antibodies decreased the binding of the AlexaFluor488 tracer antibody, thus decreasing the mean fluorescence intensity (MFI). IC50 values were generated, and using the aforementioned formula, K_{d} affinities were calculated and summarized in Table 13.

[0668] The CD3B376 binding site was tighter than the CD3B450 in both bivalent and monovalent form.

TABLE 13
IC50 and K_{d} affinity values of the anti CD3 bivalent
and monovalent CD3B376 and CD3B450 constructs

| Construct | anti CD3 | IC50 (nM) | K_{d} (nM) |
|---|---|---|---|
| Bivalent | CD3B376 | 29 | 7.3 |
| | CD3B450 | 60 | 15 |
| Monovalent | CD3B376 | 409 | 103 |
| Construct | CD3B450 | 1011 | 254 |

[0669] 1-10 Conformational Stability of Anti-CD3 Monoclonal Antibodies

[0670] Conformational stability of the anti-CD3 antibodies CD3B376, CD3B389 (IgG1 sigma version of CD3B376; heavy chain is SEQ ID NO: 729; light chain is SEQ ID NO: 676), CD3B450, and CD3B467 (IgG1 sigma version of CD3B450; heavy chain is SEQ ID NO: 728; light chain is SEQ ID NO: 677) was determined by differential scanning calorimetry (DSC). The mid-point of thermal transition, Tm, was determined from the thermal denaturation profiles of each of the Ab candidates. FIG. 12A-FIG. 12E show the thermal denaturation profiles of the anti-CD3 antibodies in PBS. Table 14 includes a summary of the Tm and the enthalpy values (ΔH) for the thermal unfolding of the anti-CD3 antibodies as determined by DSC.

[0671] The DSC results indicate that all anti-CD3 antibodies CD3B376, CD3B389, CD3B450, and CD3B467 have folded domains. Based on the onset of unfolding, the relative stability of each antibody was as follows: CD3B389<CD3B467<CD3B376<CD3B450. The anti-CD3 molecules tested by DSC displayed some differences in their thermal stability. The CD3B376 (IgG4 PAA) molecule displayed three partially unresolved transitions at 59.7, 62.4 and 69.2° C. with a total enthalpy of unfolding of 417.6 kcal/mol, while the CD3B450 (IgG4 PAA) molecule displayed two unresolved transitions at 62.5 and 66.3° C. with a total enthalpy of unfolding of 545.1 kcal/mol. The CD3B389 (IgG1sigma) molecule displayed four transitions at 54.6, 58.2, 73.1 and 77.1° C. with a total enthalpy of unfolding of 401.7 kcal/mol, while the CD3B467 (IgG1sigma) molecule displayed four transitions at 56.3, 59.6, 66.5 and 75.6° C. with a total enthalpy of unfolding of 406.2 kcal/mol.

TABLE 14
Summary of the thermal transition data for the anti-CD3 antibodies in PBS. Values represent averages of
duplicate runs. Sequence information is provided for HC and LC peptides (SEQ ID NOs in parentheses).

| | CD3B376 | | CD3B450 | | CD3B389 | | CD3B467 | |
|---|---|---|---|---|---|---|---|---|
| | HC: SEQ ID NO: 640 | | HC: SEQ ID NO: 675 | | HC: SEQ ID NO: 729 | | HC: SEQ ID NO: 728 | |
| | LC: SEQ ID NO: 676 | | LC: SEQ ID NO: 677 | | LC: SEQ ID NO: 676 | | LC: SEQ ID NO: 677 | |
| | Average | Error | Average | Error | Average | Error | Average | Error |
| Tm1 (° C.) | 59.7 | 0.1 | 62.5 | 0.9 | 54.6 | 0.1 | 56.3 | 0.1 |
| ΔH1 | 151900.0 | 4200.0 | 158175.0 | 64025.0 | 166150.0 | 2450.0 | 98160.0 | 17840.0 |
| (cal/mol) | | | | | | | | |
| Tm2 (° C.) | 62.4 | 0.1 | 66.3 | 0.2 | 58.2 | 0.1 | 59.6 | 0.0 |
| ΔH2 | 202200.0 | 4300.0 | 386900.0 | 71000.0 | 62050.0 | 1290.0 | 72900.0 | 370.0 |
| (cal/mol) | | | | | | | | |
| Tm3 (° C.) | 69.2 | 0.0 | NA | NA | 73.5 | 0.1 | 66.5 | 0.0 |
| ΔH3 | 63450.0 | 2080.0 | NA | NA | 101900.0 | 1600.0 | 92785.0 | 6785.0 |
| (cal/mol) | | | | | | | | |
| Tm4 (° C.) | NA | NA | NA | NA | 77.1 | 0.0 | 75.6 | 0.1 |
| ΔH3 | NA | NA | NA | NA | 71560.0 | 2500.0 | 142400.0 | 4800.0 |
| (cal/mol) | | | | | | | | |
| Total ΔH | 601000.0 | NA | 545075.0 | NA | 401660.0 | NA | 406245.0 | NA |

[0672] The two IgG1 antibodies display lower stability compared to the corresponding IgG4 PAA antibodies (comparing the molecules with the same variable domains) with Tm of the first transition being 5-6° C. lower (FIG. 13A and FIG. 13B and Table 14).

[0673] 1-11 Crystal Structure of CD3B334 Fab in Complex with CD3e N-Terminal Peptide

[0674] Anti-CD3 mAb CD3B334 (CD3H231/CD3L137) was modified to increase the “humanness” index by replacing a number of framework residues in the antibody by the human germline residues. This procedure yielded antibody CD3B334 with the following mutations: D43G/L49M/L50I/S62N/Q85E/H89Y in VL when compared to the parental VL CD3L124 and R10G/R13K/V73I/R79K/T83 S/L96V in VH when compared to the paretal VH CD3H219. The His-tagged Fab fragment of CD3B334 was expressed in HEK 293Expi cells and purified using affinity and size-exclusion chromatography. The N-terminal 9-mer peptide of human CD3e was synthesized at New England Peptide (Lot V1108-19/21) and mixed with Fab at molar ratio 10:1 (excess of peptide). The complex was crystallized by the vapor-diffusion method from solution containing 4 M Na formate in 0.1 M Tris, pH 8.5. The crystals belong to the orthorhombic space group P212121 with unit cell dimensions of 66.5×69.4×100.4 Å and one complex molecule in the asymmetric unit. The structure of the complex was determined at 1.8 Å resolution by the molecular replacement method using the crystal structure of the Fab as a search model. CD3B334 bound residues 1-6 of CD3e. The N-terminal Gln of the peptide was in the pyroglutamate form and in a hydrophobic environment, between F107 of HCDR3 and L99 of LCDR3. Two arginine residues, R52 and R56, from HCDR2 were engaged in electrostatic interactions with the acidic residues of CD3. In total, 16 residues formed the CD3B334 paratope. Residues from all CDRs except LCDR2 were in direct contact (within 4 Å distance) with the CD3 peptide (see FIG. 18).

[0675] 2 PSMA Antibodies

[0676] 2-1 Generation of PSMA Cell Lines

[0677] Expression vectors presenting full-length chimpanzee PSMA (H2Q3K5_PANTR, SEQ ID NO: 49) or full length Cynomolgous monkey PSMA (EHH56646.1, SEQ ID NO: 50) were generated for use as screening tools to assess the anti-PSMA leads using an in-house expression vector with the CMV promoter using standard molecular biology techniques. Vectors were transiently transfected into HEK293F cells in suspension using standard methods. Transfected 293F suspension cells were plated in growth medium plus serum to become adherent and selected for stable plasmid integration. Single cell populations were selected by serial dilution and the PSMA surface receptor expression was quantified by FACS using the (PSMAL antibody (Center) affinity Purified Rabbit Polycolonal Antibody (Catalog # OAAB02483, Aviva Systems Biology) as the primary antibody with a R-PE anti-rabbit secondary antibody (Catalog #111-116-144, Jackson ImmunoResearch Laboratories, Inc.) and a rabbit polyclonal IgG (Catalog # SC-532, Santa Cruz Biotechnology) as the isotype control).

[0678] Human PSMA expressing cell lines were generated using lentivirus (Genecopoeia, cat # EX-G0050-Lv105-10) containing full length human PSMA (FOLH1_HUMAN, SEQ ID NO:51) and puromycin for selection of PSMA positive cells. HEK293F cells (ATCC), negative for PSMA, were transduced with Lentiviral particles to overexpress human PSMA. Following transduction, cells positively expressing PSMA and the resistance marker were selected by treating pooled cells, grown in DMEM+10% HI FBS (Life Technologies) and supplemented with varying concentrations of Puromycin (Life Technologies).

[0679] In addition to the HEK generated cell lines, several commercial cell lines were used for phage panning and binding and cellular toxicity assays. LNCaP clone FGC cells (ATCC cat # CRL-1740) are a commercially available human prostate cancer cell lines. C4-2B cells were originally developed at MD Anderson and are derived from LNCaP FGC grown in vivo and metastasize to bone marrow (Thalmann, et al 1994, Cancer Research 54, 2577-81).

[0680] 2-2 Generation of Soluble PSMA ECD Proteins

[0681] Recombinant chimpanzee PSMA Extra Cellular Domain (ECD) protein (Chimp PSMA ECD, SEQ ID NO:52) was generated for panning and to assess the anti-PSMA leads using an in-house expression vector with the CMV promoter using standard molecular biology techniques. The chimp PSMA ECD gene fragment (amino acid 44-750 of SEQ ID NO:49) with N-terminal signal sequence (SEQ ID NO:594), N-terminal Avitag (SEQ ID NO:595) and 6-His tags (SEQ ID NO:596) was cloned using an in-house expression vector with the CMV promoter using standard molecular biology techniques and transiently expressed in 293Expi cells (Invitrogen). cDNA was prepared using gene synthesis techniques (U.S. Pat. Nos. 6,670,127; 6,521,427). Supernatants were harvested and clarified by centrifugation. The proteins were purified using a two-step purification process: 1) IMAC purification with a HisTrap HP column (GE Healthcare) and 2) size exclusion purification (Superdex 200, Ge Healthcare) where the elution buffer is Dulbecco's phosphate-buffered saline, calcium, magnesium (Thermofisher, #14040) containing 0.5 mM ZnCl₂ to stabilize PSMA dimerization. Fractions containing the protein of interest were pooled and protein concentration was determined by A280. This material was used for binding and affinity measurements and is referred to as PSMG8.

[0682] Chimp PSMA ECD was also biotinylated for panning. The BirA plasmid that was co-transfected into mammalian cells to biotinylate proteins containing the Avi tag was created in-house. The BirA coding region (SEQ ID NO:597) was fused to the signal peptide from mouse IgG heavy chain (SEQ ID NO:598), and an ER retention signal (KDEL (SEQ ID NO: 716)) was added to the C-terminus to generate the BirA plasmid (SEQ ID NO:599). The constructed gene was cloned into an expression vector under the control of the CMV promoter. To produce biotinylated PSMA antigen, the PSMA plasmid DNA was added in a 4-fold excess (w/w) to the BirA plasmid into the transfection mix.

[0683] Biotinylation of the Chimp PSMA ECD protein was performed via the Avi tag by cotransfection of a BirA expression construct and the resulting secreted protein was purified using a two-step purification process: 1) IMAC purification with a HisTrap HP column (GE Healthcare) and 2) size exclusion purification (Superdex 200, Ge Healthcare) where the elution buffer is Dulbecco's phosphate-buffered saline, calcium, magnesium (Thermofisher, #14040) containing 0.5 mM ZnCl2 to stabilize PSMA dimerization. The protein was tested for endotoxin prior to use in phage panning studies.

[0684] Recombinant cynomolgous monkey PSMA extracellular domain (ECD) protein (cyno PSMA ECD, SEQ ID NO:53), corresponding to amino acids 44-750 of SEQ ID NO:50 with N-terminal signal (SEQ ID NO:594), N-terminal Avi- (SEQ ID NO:595) and 6His- (SEQ ID NO:596) tags was cloned and expressed as described previously for the chimp PSMA ECD. Biotinylation of the cyno PSMA ECD protein was performed via the Avi tag by cotransfection of a BirA expression construct and the resulting secreted protein was purified by a two-step purification using IMAC HisTrap HP column (GE Healthcare) and MonoAvidin columns. The protein was tested for endotoxin prior to use in phage panning studies. This material was also used for binding and affinity measurements and is referred to as PSMG1.

[0685] A second recombinant cyno PSMA ECD protein (Cyno PSMA Fc, SEQ ID NO:54) with an IgG1 Fc (SEQ ID NO:593) was cloned and expressed using an in-house expression vector with the CMV promoter using standard molecular biology techniques. CynoPSMA Fc protein was transiently expressed in 293HEK-expi cells. Transient transfection of PSMG3 in HEK293 Expi cells were harvested 5 days after transfection, clarified by centrifugation (30 min, 6000 rpm) and filtered (0.2μ PES membrane, Corning). The relative amount of IgG was determined with the Octet instrument (ForteBio) using a purified known IgG (same isotype) spiked into spent medium to generate the standard curve.

[0686] Clarified Cyno PSMA Fc supernatant was loaded onto an equilibrated (dPBS, pH 7.2) HiTrap MabSelect Sure Protein A column (GE Healthcare) at a relative concentration of ˜30 mg protein per ml of resin. After loading, the column was washed with dPBS, pH7.2 and protein eluted with 10 column volumes of 0.1 M Na-Acetate, pH 3.5. Peak fractions were pooled, neutralized with 2M Tris, pH 7, and filtered (0.2μ). The neutralized protein sample was dialyzed against 3 changes of dPBS containing Ca2+, Mg2+, and 0.5 mM ZnCl2, pH 7.2 overnight at 4° C. The next day, sample was removed from dialysis, filtered (0.2μ) and the protein concentration determined by absorbance at 280 nm on a BioTek SynergyHT™ spectrophotometer. The quality of the purified proteins was assessed by SDS-PAGE and analytical size exclusion HPLC (Dionex HPLC system). Endotoxin levels were measured using a LAL assay (Pyrotell-T, Associates of Cape Cod). Purified proteins were stored at 4° C.

[0687] Recombinant human PSMA extracellular domain (ECD) protein (human PSMA ECD, SEQ ID NO:55), corresponding to amino acids 44-750 of SEQ ID NO:51 with N-terminal Avi- and 6His tags (SEQ ID NO: 596) was cloned, expressed and purified as described previously for the chimp and cyno PSMA ECD proteins.

[0688] 2-3 Identification of Anti-Chimp and Anti-Human PSMA Fabs

[0689] Panning with Recombinant Protein

[0690] A first solution panning of the de novo Human Fab-pIX libraries [Shi, L., et al J Mol Biol, 2010. 397(2): p. 385-396. WO 2009/085462], consisting of VH1-69, 3-23 and 5-51 heavy chain libraries paired with four human VL germline genes (A27, B3, L6, O12) libraries, was performed using an alternating panning approach with one round of phage capture on Strepavidin beads (Invitrogen Cat #112.05D, Lot #62992920) coated with biotinylated Chimp PSMA ECD according to the manufacturer's protocol, followed by phage capture on ProtG beads (Invitrogen, Cat #10003D) coated with Cyno-PSMA-Fc according to the manufacturer's protocol followed by phage capture on Sera-mag Double Speed magnetic Neutravidin beads (Thermo, Cat #7815-2104-011150) coated with biotinylated Chimp PSMA ECD according to the manufacturer's protocol. This panning yielded two hits: PSMM18 and PSMM25.

[0691] Whole Cell Panning for Anti-PSMA Fabs

[0692] Additional panning experiments were performed on whole cells using the Round #1 output from the chimpanzee ECD panning experiments described above or fresh de novo phage libraries, as input. Briefly, phage was produced by helper phage infection and concentrated by PEG/NaCl precipitation according to standard protocols known in the art. The phage libraries were pre-cleared on untransfected parental HEK293F cells overnight at 4° C. with gentle rocking.

[0693] Following PEG/NaCl precipitation, the pre-cleared libraries were incubated with chimp PSMA expressing HEK293 cells or LNCAP cells with gentle rocking for 2 hr at 4° C. The removal of unbound phage and the recovery of phage-bound cells was performed by Ficoll gradient, and following several wash steps with, cells carrying bound phage were incubated with 1 mL of TG-1 E. coli culture at 37° C. for 30 minutes without agitation. The resulting mixture was plated on LB-Carbenicillin-1% Glucose plates and grown over night at 37° C. The process was then repeated for subsequent panning rounds.

[0694] Conversion of Phage Fab-pIX to Fab-his for Generating E. coli Supernatants

[0695] The resulting phage Fab-pIX hits were converted to Fab-His using a standard procedure. Plasmid DNA was isolated from phage panned E. coli (Plasmid Plus Maxi Kit, Qiagen cat #12963) and subjected to NheI/SpeI restriction digest. The resulting 5400 and 100 bp fragments were separated on a 0.8% agarose gel and the 5400 bp fragment was gel purified (MinElute PCR purification kit, Qiagen cat #28006). The purified 5400 bp band was self-ligated using T4 ligase and the resulting product (encoding the Fab-his fusion) was transformed back into the TG-1 E. coli strain and clonally isolated. Fab-His supernatants were generated from clones by overnight induction of cultures with 1 mM IPTG. Following centrifugation of the overnight culture, clarified supernatants were ready for use in downstream assays. To determine the relative expression levels of different Fab-his supernatants, an anti-kappa (Southern Biotech cat #2061-05) ELISA on serially diluted supernatants was performed. All of the clones tested exhibited similar Fab-his expression (data not shown).

[0696] Cell Binding of Fab-his Fusions from E. coli

[0697] A cell-based binding assay was designed to assess the binding capabilities of individual Fab-his fusions from E. coli supernatants to PSMA-expressing cells. Individual Fab clones were isolated from the round 3 output of all panning experiments following pIX excision. Fab clones were tested for binding to chimp and cyno PSMA expressing HEK cells, as well as to human PSMA on LNCaP cells. Briefly, PSMA expressing cells were aliquoted into a V-bottom plate (CoStar 3357) at a density of 200,000 per well and incubated with (100 μl) supernatants expressing Fab fragments for 1 hour on ice. Cells were washed twice with PBS containing 2% FBS, and stained with a mouse anti-human kappa-RPE antibody (Life Technologies cat # MH10514) for 1 hour on ice. Cells were washed twice with PBS containing 2% FBS and resuspended in 100 μL of the same wash buffer. Plates were read on a BD FACS Array flow cytometer. FACS data was analyzed in FlowJo software by live gating the healthy population of cells using forward scatter and side scatter, and then analyzing the cells within this gate for PE staining. Mean fluorescence intensity (MFI) was calculated and exported into Microsoft Excel. Fab clones that exhibited binding ≥3 times background for all three species of PSMA (cyno, chimp and human), and exhibited no binding to the HEK293 cell line, were labeled as “preliminary positive”. Fabs were sequenced and moved forward for cloning into mammalian expression vector for rescreening. True positives were selected from the binding of mammalian cell expressed Fab supernatants to PSMA-expressing cell lines.

[0698] Preparation of Mammalian Fabs

[0699] For conversion of E. coli Fab to mammalian-expressed Fab, In-Fusion HD cloning (ClonTech cat #638918) was utilized according to the manufacturer's protocol. Briefly, nucleotide sequences of clones that have passed the primary screen and are to be moved into mammalian Fab format, are loaded into the “InFu Primer Finder v1.2.3” program (software developed in-house), which generates a list of isotype-specific PCR primers used to generate PCR fragments for In-Fusion cloning into the huKappa_muIgGSP and huG1 Fab expression vectors. These vectors are in-house vectors with CMV promotors based off of pcDNA3.1. Following the In-fusion process, E. coli clones were isolated, sequence verified and transfected into HEK293 cells using standard protocols. Mammalian PSMA Fabs for confirming binding to PSMA expressing cell lines were prepared by harvesting 20 ml of supernatants from transfection after 5 days.

[0700] Rescreening Hits from Whole Cell Panning in Mammalian Sup Format

[0701] Confirmation of mammalian expressed Fab supernatants was performed using the whole cell binding assay described previously. Binding of Fabs to human PSMA (LNCaP), chimpanzee, and cynomolgous monkey cells was tested, as well as counter screening for no binding to the parental HEK cell line. Table 19 shows the hit profile of mammalian Fab supernatant binding to PSMA-expressing cells. Many of the hits from E. coli supernatants did not confirm with mammalian expressed proteins. PSMM48 showed high binding to cyno PSMA-expressing cells and some binding to chimp-PSMA expressing cells, but no binding to LNCaP cells expressing human PSMA. PSMM56 showed a similar profile, but with some binding to LNCaP cells. PSMM69-80 bound to LNCaP cells, but not to chimp- or cyno-PSMA expressing cells. Mammalian Fab sups PSMM52, M56 and M57, bound all three cell lines. PSMM50, M51, and M54, show more chimp or cyno binding. M58 showed slight chimp and cyno binding.

TABLE 19
Hit profile of Mammalian Fab protein binding to PSMA-expressing
cells measured by Geo-MFI (Mean Fluoresent Instensity)

| Fab ID (Fab DNA ID) | cyno | chimp | LNCaP | Parent HEK |
|---|---|---|---|---|
| PSMB10 (PSMM10) | 244 | 81.6 | — | 248 |
| PSMB11 (PSMM11) | 19 | 6.6 | — | 8.14 |
| PSMB12 (PSMM12) | 31.6 | 8.05 | — | 12.6 |
| PSMB13 (PSMM13) | 57.8 | 18.2 | — | 50.5 |
| PSMB14 (PSMM14) | 32.6 | 13.1 | — | 22.2 |
| PSMB15 (PSMM15) | 40.4 | 18.5 | — | 38 |
| PSMB16 (PSMM16) | 175 | 220 | — | 6.39 |
| PSMB17 (PSMM17) | 34.9 | 22.4 | — | 40.1 |
| PSMB18 (PSMM18) | 696 | 439 | — | 8.71 |
| PSMB19 (PSMM19) | 53.7 | — | 5.15 | 4.47 |
| PSMB20 (PSMM20) | 5.75 | — | 5.85 | 41.3 |
| PSMB21 (PSMM21) | 94.4 | — | 20.7 | 372 |
| PSMB22 (PSMM22) | 9.07 | — | 7.92 | 54.9 |
| PSMB23 (PSMM23) | 16.4 | — | 6.66 | 164 |
| PSMB24 (PSMM24) | 14.6 | 9.6 | 4.09 | 3.96 |
| PSMB25 (PSMM25) | 15.2 | 11.3 | 16.9 | 4.09 |
| PSMB26 (PSMM26) | 9.48 | — | 7.26 | 114 |
| PSMB27 (PSMM27) | 20 | — | 7.56 | 136 |
| PSMB28 (PSMM28) | 29.7 | — | 8.88 | 302 |
| PSMB29 (PSMM29) | 6.87 | — | 5.7 | 72.8 |
| PSMB30 (PSMM30) | 5.16 | — | 4.58 | 45 |
| PSMB31 (PSMM31) | 5.99 | — | — | 25.5 |
| PSMB32 (PSMM32) | 4.81 | — | — | 27.1 |
| PSMB33 (PSMM33) | 5.14 | — | — | 40.1 |
| PSMB34 (PSMM34) | 17.9 | — | — | 107 |
| PSMB35 (PSMM35) | 58.5 | — | — | 231 |
| PSMB36 (PSMM36) | 5.05 | — | — | 6.96 |
| PSMB37 (PSMM37) | 23.4 | — | — | 178 |
| PSMB38 (PSMM38) | 4.05 | — | — | 7.7 |
| PSMB39 (PSMM39) | 10.2 | — | — | 166 |
| PSMB40 (PSMM40) | 66.9 | — | — | 348 |
| PSMB41 (PSMM41) | 5.39 | — | — | 12 |
| PSMB42 (PSMM42) | 7.35 | — | — | 25.8 |
| PSMB43 (PSMM43) | 8.73 | — | — | 7.18 |
| PSMB44 (PSMM44) | 12.6 | — | — | 48.9 |
| PSMB45 (PSMM45) | 22.4 | — | — | 43.1 |
| PSMB46 (PSMM46) | 3.88 | — | — | 5.29 |
| PSMB47 (PSMM48) | 101 | 25.5 | 3.46 | 2.85 |
| PSMB48 (PSMM49) | 2.72 | 3.18 | 2.68 | 2.72 |
| PSMB49 (PSMM50) | 51.6 | 22 | 3.22 | 3.48 |
| PSMB51 (PSMM52) | 285 | 231 | 41.5 | 2.68 |
| PSMB52 (PSMM53) | 39.2 | 6.89 | 2.67 | 2.56 |
| PSMB53 (PSMM54) | 27.6 | 17.8 | 4 | 2.6 |
| PSMB54 (PSMM55) | 2.7 | 2.75 | 2.65 | 2.79 |
| PSMB55 (PSMM56) | 226 | 180 | 17.2 | 2.58 |
| PSMB56 (PSMM57) | 95.6 | 34.7 | 24.5 | 2.52 |
| PSMB57 (PSMM58) | 19.8 | 11 | 3.26 | 2.68 |
| PSMB58 (PSMM59) | 121 | 192 | 25.3 | 2.67 |
| PSMB59 (PSMM60) | 4.96 | 9.69 | 6.04 | 3 |
| PSMB60 (PSMM61) | 2.28 | 3.07 | 87.3 | 4.64 |
| PSMB61 (PSMM62) | 2.1 | 3.16 | 135 | 2.98 |
| PSMB62 (PSMM63) | 7.17 | 4.43 | 54.9 | 9.09 |
| PSMB63 (PSMM64) | 2.07 | 2.95 | 27 | 2.82 |
| PSMB64 (PSMM65) | 2.39 | 3.26 | 70.5 | 3.05 |
| PSMB65 (PSMM66) | 2.3 | 3.13 | 32.4 | 4.25 |
| PSMB66 (PSMM67) | 2.14 | 3 | 24.6 | 2.83 |
| PSMB67 (PSMM68) | 2.23 | 2.95 | 21 | 2.95 |
| PSMB68 (PSMM69) | 5.44 | — | 134 | 35.3 |
| PSMB69 (PSMM70) | 2.29 | 3.38 | 25.5 | 3.35 |
| PSMB70 (PSMM71) | 2.22 | 3.49 | 15.5 | 3.26 |
| PSMB71 (PSMM72) | 2.54 | 4.4 | 18.5 | 3.07 |
| PSMB72 (PSMM73) | 2.13 | 3.53 | 227 | 3.02 |
| PSMB73 (PSMM74) | 2.97 | 4.13 | 125 | 11.1 |
| PSMB74 (PSMM75) | 120 | — | 178 | 132 |
| PSMB75 (PSMM76) | 2.99 | 3.04 | 173 | 7.89 |
| PSMB76 (PSMM77) | 3.75 | 3.99 | 138 | 3.95 |
| PSMB77 (PSMM78) | 4.68 | 3.96 | 144 | 4.71 |
| PSMB78 (PSMM79) | 25.2 | — | 378 | 24.4 |
| PSMB79 (PSMM80) | 38.4 | — | 512 | 157 |
| PSMB80 (PSMM81) | 19.6 | 18.6 | 20.9 | 6.61 |
| PSMB81 (PSMM82) | 2.63 | 2.06 | 4.07 | 2.69 |
| PSMB82 (PSMM83) | 2.79 | 2.23 | 4.11 | 2.76 |
| PSMB83 (PSMM84) | 2.59 | 2.28 | 4.09 | 2.74 |
| PSMB84 (PSMM85) | 750 | 729 | 192 | 3.15 |
| PSMB85 (PSMM86) | 2.84 | 2.59 | 2.33 | 3.24 |
| PSMB86 (PSMM87) | 224 | 176 | 31.7 | 2.82 |
| PSMB87 (PSMM88) | 2.63 | 2.27 | 4.23 | 2.91 |
| PSMB88 (PSMM89) | 37.7 | 29.7 | 30.3 | 7.6 |
| PSMB89 (PSMM90) | 27.1 | 27.3 | 53.2 | 39.5 |
| PSMB90 (PSMM91) | 26.7 | 24.7 | 47.1 | 36.4 |
| PSMB91 (PSMM92) | 8.97 | 6.16 | 13 | 6.63 |
| PSMB92 (PSMM93) | 20 | 16.5 | 57.1 | 50 |
| PSMB93 (PSMM94) | 5.13 | 9.62 | 2.5 | 3.66 |
| PSMB94 (PSMM95) | 5.12 | 2.67 | 2.22 | 3.57 |
| PSMB95 (PSMM96) | 8.9 | 8.82 | 13.4 | 11.4 |
| PSMB96 (PSMM97) | 2.4 | 3.25 | 2.53 | 4.03 |
| PSMB97 (PSMM98) | 2.57 | 4.73 | 2.52 | 3.7 |
| PSMB99 (PSMM100) | 9.95 | 2.4 | 2.39 | 4.03 |
| PSMB100 (PSMM101) | 4.03 | 2.52 | 2.33 | 3.37 |
| PSMB100 (PSMM101) | 3.5 | 2.86 | 2.48 | 4.57 |
| PSMB101 (PSMM102) | 5.49 | 3.18 | 2.23 | 3.33 |
| PSMB102 (PSMM103) | 2.4 | 2.42 | 2.16 | 3.2 |
| PSMB103 (PSMM104) | 3.52 | 3.26 | 2.58 | 4.44 |
| PSMB104 (PSMM105) | 2.15 | 2.5 | 2.34 | 3.95 |
| PSMB105 (PSMM106) | 2.03 | 2.39 | 2.18 | 3.39 |
| PSMB106 (PSMM107) | 2 | 2.4 | 2.27 | 3.59 |
| PSMB107 (PSMM108) | 2 | 2.47 | 2.33 | 3.49 |
| PSMB108 (PSMM109) | 2 | 2.58 | 2.28 | 3.46 |
| PSMB109 (PSMM110) | 321 | 326 | 34.9 | 6.11 |
| PSMB110 (PSMM111) | 2.3 | 2.31 | 2.31 | 3.4 |
| PSMB111 (PSMM112) | 2.32 | 2.31 | — | 3.21 |
| PSMB112 (PSMM113) | 6.28 | 5.7 | 2.71 | 3.28 |
| PSMB113 (PSMM114) | 2.82 | 2.95 | 2.32 | 3.29 |
| PSMB114 (PSMM115) | 2.78 | 2.47 | 4.3 | 3.14 |
| PSMB115 (PSMM116) | 2.66 | 2.59 | 2.2 | 3.14 |
| PSMB46 (PSMM117) | 4.54 | 3.18 | 2.21 | 4.79 |
| PSMB67 (PSMM118) | 3.95 | 4.3 | 3 | 6.13 |
| PSMB74 (PSMM119) | 7.94 | 13 | 3.16 | 12.5 |
| PSMB78 (PSMM120) | 5.08 | 4.79 | 22.3 | 6.82 |
| PSMB81 (PSMM121) | 3.66 | 3.83 | 3.05 | 5.11 |
| PSMB82 (PSMM122) | 15.1 | 28.4 | 10.8 | 24.3 |
| PSMB83 (PSMM123) | 37.5 | 42.1 | 3.04 | 4.88 |
| PSMB85 (PSMM124) | 34.6 | 52.9 | 20.7 | 46.8 |
| PSMB87 (PSMM125) | 4.23 | 3.74 | 2.26 | 4.73 |
| PSMB89 (PSMM126) | 51.8 | 53.1 | 11.7 | 6.27 |
| PSMB90 (PSMM127) | 42.8 | 30.2 | 7.74 | 5.99 |
| PSMB91 (PSMM128) | 3.9 | 27.6 | 2.37 | 4.32 |
| PSMB92 (PSMM129) | 45.7 | 37.3 | 12.1 | 7.4 |
| PSMB93 (PSMM130) | 5.13 | 7.85 | 4.11 | 7.82 |
| PSMB94 (PSMM131) | 3.67 | 3.23 | 2.32 | 4.72 |
| PSMB95 (PSMM132) | 4.05 | 3.64 | 2.56 | 5.57 |
| PSMB96 (PSMM133) | 3.91 | 4.54 | 2.37 | 4.65 |
| PSMB97 (PSMM134) | 3.22 | 3.16 | 4.08 | 4.22 |
| PSMB98 (PSMM135) | 15.6 | 12.7 | 2.22 | 4.21 |
| PSMB99 (PSMM136) | 4.08 | 3.26 | 2.22 | 5.04 |
| PSMB100 (PSMM137) | 5.24 | 3.82 | 2.16 | 4.83 |
| PSMB101 (PSMM138) | 3.84 | 3.14 | 2.23 | 4.52 |
| PSMB102 (PSMM139) | 4.51 | 3.82 | 2.23 | 4.59 |
| PSMB103 (PSMM140) | 6.81 | 4.27 | 2.21 | 5.41 |
| PSMB104 (PSMM141) | 7.52 | 4.35 | 2.26 | 4.39 |
| PSMB105 (PSMM142) | 5.03 | 11.2 | 4.87 | 7.28 |
| PSMB106 (PSMM143) | 3.87 | 3.8 | 2.73 | 4.9 |
| PSMB107 (PSMM144) | 3.3 | 3.35 | 2.3 | 4.64 |
| PSMB108 (PSMM145) | 6.78 | 3.83 | 2.33 | 4.98 |
| PSMB110 (PSMM146) | 4.03 | 3.23 | 2.28 | 5.3 |
| PSMB111 (PSMM147) | 3.71 | 3.26 | 2.36 | 5.11 |
| PSMB112 (PSMM148) | 4.54 | 3.26 | 2.26 | 4.86 |
| PSMB113 (PSMM149) | 84.3 | 104 | 51.7 | 94.2 |
| PSMB114 (PSMM150) | 3.31 | 3.26 | 2.21 | 5.14 |
| PSMB115 (PSMM151) | 3.55 | 3.43 | 2.3 | 4.21 |

[0702] Dose Response Curves of Mammalian Expressed Fabs

[0703] Once mammalian expressed Fab clones were confirmed for positive binding as neat Fab supernatants to PSMA expressing cell lines, the supernatants were normalized for protein concentration by Octet or protein gel, and dose-response curves were completed to confirm PSMA binding using the protocol described previously. FIG. 22-FIG. 24 show titration curves for hits that demonstrated binding to all three PSMA-expressing cells. FIGS. 22A, 22B, 22C and 22D show the titration curves for anti-PSMA panning hits vs. LNCaP cells. FIGS. 23A, 23B, 23C, and 23D show the titration curves for anti-PSMA panning hits vs chimp-PSMA HEK cells. FIGS. 24A, 24B, 24C, and 24D show the titration curves for anti-PSMA panning hits vs Cyno-PSMA HEK cells. Binding profiles among hits were compared across cell lines expressing different species of PSMA. PSMM52 supernatant was used as a positive control across experiments. Several hits were deprioritized because of N-linked glycosylation sites in CDRs, binding to the PSMA negative parental HEK cell line, or lack of binding to PSMA positive cell lines. Eleven Fab hits remained and 10 hits were cloned into human IgG4-PAA heavy chain constructs and used to generate PSMA×CD3 bispecific antibodies. These hits showed cross-species binding within 3-fold of each other and were moved into a bispecific antibody format to be tested for T cell redirection killing of PSMA positive targets. The panning antigens for each hit is shown in Table 20.

TABLE 20
Antigen for each of the panning hits

| | Round 2-3 | | |
|---|---|---|---|
| Round 1 antigen | antigen | Hits | Hit identification |
| Chimp PSMA ECD | Cyno PSMA | 2 | PSMM18, PSMM25 |
| | ECD | | |
| Chimp PSMA ECD | Chimp PSMA | 9 | PSMM50, PSMM52, |
| | HEK | | PSMM57, PSMM59, |
| | | | PSMM110, PSMM56, |
| | | | PSMM85, PSMM84 |
| LNCaP | Chimp PSMA | 2 | PSMM87, PSMM81 |
| | HEK | | |

[0704] Preparation of Anti-PSMA mAbs

[0705] A total of 12 clones that demonstrated binding to all three PSMA-expressing cells were ultimately converted to mAb IgG4 having Fc substitutions S228P, F234A, and L235A (PAA) isotype by restriction cloning. Briefly, constructs corresponding to Fab clones that have passed initial screens were digested with HindIII and ApaI. Gel purified fragments were ligated into an expression vector with CMV promotervDR000215, a CMV driven expression vector containing the human IgG4-PAA Fc for full mAb expression. This allowed for rapid generation of bispecific antibodies. The expression vector previously described was used to express the Heavy and Light Chains for each PSMA mab, where both vectors were co-transfected transiently into 293Expi or CHO cell lines for expression of the mAb. CDR sequences of cross-species positive PSMA Fabs generated from phage panning are shown below in Table 21. VH and VL sequences of the selected Fabs are shown below in Table 22. Heavy and light chain sequences of mAbs generated from the Fabs are shown in Table 23.

TABLE 21
CDR sequences (defined according to Kabat) of FAbs from phage panning
(corresponding SEQ ID NOs are listed in parentheses)

| | | CDRs (SEQ ID NO:) | | |
|---|---|---|---|---|
| FAB ID | | CDR1 | CDR2 | CDR3 |
| PSMB109 | HC | NAWIS | WINPESGRANYAQKFQG | ELYYLVYSTYYYAFDY |
| | | (62) | (63) | (64) |
| | LC | RASQSIDRWLN | AASSLQS | QQSPRYPLT |
| | | (65) | (60) | (66) |
| PSMB86 | HC | SYDIS | GIIPIEGTANYAQKFQG | DYPAGYGFDY |
| | | (67) | (68) | (69) |
| | LC | RASQSVSSSYLA | GASSRAT | QQYGSSPLT |
| | | (70) | (71) | (72) |
| PSMB84 | HC | SDWMS | AISGNGGSTEYADSVKG | DPYYYYDGDSYYGMDV |
| | | (73) | (74) | (72) |
| | LC | RASQSISSYLN | AASSLQS | QQSYSTP |
| | | (76) | (60) | (61) |
| PSMB83 | HC | SDAMH | EISGSGGYTNYADSVKG | DSYDSSLYVGDYFDY |
| | | (78) | (79) | (80) |
| | LC | RASQSVSSYLA | DASNRAT | QQRSNWPLT |
| | | (81) | (82) | (83) |
| PSMB56 | HC | SYAIS | WISPYNGNANYAQKFQG | DSDRSYNLDY |
| | | (84) | (85) | (86) |
| | LC | | | |
| | | (87) | (60) | (88) |
| PSMB55 | HC | SYWIG | IIYPGDSDTRYSPSFQG | GLPIWYLDY |
| | | (89) | (90) | (91) |
| | LC | RASQSVASDLA | FASNRAT | QQSITWPFT |
| | | (92) | (93) | (94) |
| PSMB51 | HC | SYAIS | WIIPYNGNANYAQKFQG | VNSAALVWERLDY |
| | | (95) | (96) | (97) |
| | LC | RASQSIDRWLN | AASSLQS | QQSPRYPLT |
| | | (65) | (60) | (66) |
| PSMB49 | HC | SYAIS | GIIPIFGTANYAQKFQG | ASRVWHASYGYLDY |
| | | (84) | (98) | (99) |
| | LC | RASQSVSKWLA | DASNRAT | QQRFTAPWT |
| | | (100) | (82) | (101) |
| PSMB25 | HC | WYWIG | IIYPGDSDTRYSPSFQG | GWAYDRGLDY |
| | | (89) | (90) | (102) |
| | LC | KSSQSVLYSSNNKNYLA | WASTRES | QQYYSTPLT |
| | | (103) | (104) | (105) |
| PSMB18 | HC | SYWIG | IIYPGDSDTRYSPSFQG | AYHYSKGLDY |
| | | (89) | (90) | (106) |
| | LC | KSSQSVLYSSNNKNYLA | WASTRES | QQYYSTPLT |
| | | (103) | (104) | (105) |
| PSMB80 | HC | DYAIS | RIDPIEGTANYAQKFQG | DRYYYDGVYWYSDYFDY |
| | | (107) | (108) | (109) |
| | LC | RASQSISSYLN | AASSLQS | QQSYSTPLT |
| | | (76) | (60) | (88) |
| PSMB58 | HC | SYWIS | IIYPGDSYTRYSPSFQG | DYEWELFDSRLDY |
| | | (56) | (57) | (58) |
| | LC | RASQSISSYLN | AASSLQS | QQSYSTP |
| | | (59) | (60) | (61) |

TABLE 22
VH and VL sequences of PSMA Fabs

| | | | VL Amino | |
|---|---|---|---|---|
| FAB ID | VH Amino acid sequence | SEQ ID NO | Acid Sequence | SEQ ID NO |
| PSMB109 | QVQLVQSGAEVKKPGSSVKVSCKASGGTF | 110 | DIQMTQSPSSLSASVGDRV | 111 |
| | SSYAISWVRQAPGQGLEWMGWISPYNGNA | | TITCRASQSIDRWLNWYQQ | |
| | NYAQKFQGRVTITADESTSTAYMELSSLR | | KPGKAPKLLIYAASSLQSG | |
| | SEDTAVYYCARVNSAALVWERLDYWGQGT | | VPSRFSGSGSGTDFTLTIS | |
| | LVTVSS | | SLQPEDFATYYCQQSPRYP | |
| | | | LTFGQGTKVEIK | |
| PSMB86 | QVQLVQSGAEVKKPGSSVKVSCKASGGTF | 112 | EIVLTQSPGTLSLSPGERA | 113 |
| | KSYDISWVRQAPGQGLEWMGGIIPIEGTA | | TLSCRASQSVSSSYLAWYQ | |
| | NYAQKFQGRVTITADESTSTAYMELSSLR | | QKPGQAPRLLIYGASSRAT | |
| | SEDTAVYYCARDYPAGYGFDYWGQGTLVT | | GIPDRFSGSGSGTDFTLTI | |
| | VSS | | SRLEPEDFAVYYCQQYGSS | |
| | | | PLTFGQGTKVEIK | |
| PSMB84 | EVQLLESGGGLVQPGGSLRLSCAASGFTF | 114 | DIQMTQSPSSLSASVGDRV | 115 |
| | DSDWMSWVRQAPGKGLEWVSAISGNGGST | | TITCRASQSISSYLNWYQQ | |
| | EYADSVKGRFTISRDNSKNTLYLQMNSLR | | KPGKAPKLLIYAASSLQSG | |
| | AEDTAVYYCARDPYYYYDGDSYYGMDVWG | | VPSRFSGSGSGTDFTLTIS | |
| | QGTLVTVSS | | SLQPEDFATYYCQQSYSTP | |
| | | | LTFGQGTKVEIK | |
| PSMB83 | EVQLLESGGGLVQPGGSLRLSCAASGFTF | 116 | EIVLTQSPATLSLSPGERA | 117 |
| | KSDAMHWVRQAPGKGLEWVSEISGSGGYT | | TLSCRASQSVSSYLAWYQQ | |
| | NYADSVKGRFTISRDNSKNTLYLQMNSLR | | KPGQAPRLLIYDASNRATG | |
| | AEDTAVYYCARDSYDSSLYVGDYFDYWGQ | | IPARFSGSGSGTDFTLTIS | |
| | GTLVTVSS | | SLEPEDFAVYYCQQRSNWP | |
| | | | LTFGQGTKVEIK | |
| PSMB80 | QVQLVQSGAEVKKPGSSVKVSCKASGGTF | 118 | DIQMTQSPSSLSASVGDRV | 119 |
| | DDYAISWVRQAPGQGLEWMGRIDPIEGTA | | TITCRASQSISSYLNWYQQ | |
| | NYAQKFQGRVTITADESTSTAYMELSSLR | | KPGKAPKLLIYAASSLQSG | |
| | SEDTAVYYCARDRYYYDGVYWYSDYFDYW | | VPSRFSGSGSGTDFTLTIS | |
| | GQGTLVTVS | | SLQPEDFATYYCQQSYSTP | |
| | | | LTFGQGTKVEIK | |
| PSMB58 | EVQLVQSGAEVKKPGESLKISCKGSGYSF | 120 | DIQMTQSPSSLSASVGDRV | 115 |
| | TSYWISWVRQMPGKGLEWMGIIYPGDSYT | | TITCRASQSISSYLNWYQQ | |
| | RYSPSFQGQVTISADKSISTAYLQWSSLK | | KPGKAPKLLIYAASSLQSG | |
| | ASDTAMYYCARDYEWELFDSRLDYWGQGT | | VPSRFSGSGSGTDFTLTIS | |
| | LVTVSS | | SLQPEDFATYYCQQSYSTP | |
| | | | LTFGQGTKVEIK | |
| PSMB56 | QVQLVQSGAEVKKPGSSVKVSCKASGGTF | 121 | DIQMTQSPSSLSASVGDRV | 122 |
| | SSYAISWVRQAPGQGLEWMGWISPYNGNA | | TITCRASQSISGWLNWYQQ | |
| | NYAQKFQGRVTITADESTSTAYMELSSLR | | KPGKAPKLLIYAASSLQSG | |
| | SEDTAVYYCARDSDRSYNLDYWGQGTLVT | | VPSRFSGSGSGTDFTLTIS | |
| | VSS | | SLQPEDFATYYCQQSYSTP | |
| | | | LTFGQGTKVEIK | |
| PSMB55 | EVQLVQSGAEVKKPGESLKISCKGSGYSF | 123 | EIVLTQSPATLSLSPGERA | 124 |
| | TSYWIGWVRQMPGKGLEWMGIIYPGDSDT | | TLSCRASQSVASDLAWYQQ | |
| | RYSPSFQGQVTISADKSISTAYLQWSSLK | | KPGQAPRLLIYFASNRATG | |
| | ASDTAMYYCARGLPIWYLDYWGQGTLVTV | | IPARFSGSGSGTDFTLTIS | |
| | SSA | | SLEPEDFAVYYCQQSITWP | |
| | | | FTFGQGTKVEIK | |
| PSMB51 | QVQLVQSGAEVKKPGSSVKVSCKASGGTF | 125 | DIQMTQSPSSLSASVGDRV | 111 |
| | SSYAISWVRQAPGQGLEWMGWIIPYNGNA | | TITCRASQSIDRWLNWYQQ | |
| | NYAQKFQGRVTITADESTSTAYMELSSLR | | KPGKAPKLLIYAASSLQSG | |
| | SEDTAVYYCARVNSAALVWERLDYWGQGT | | VPSRFSGSGSGTDFTLTIS | |
| | LVTVSS | | SLQPEDFATYYCQQSPRYP | |
| | | | LTFGQGTKVEIK | |
| PSMB49 | QVQLVQSGAEVKKPGSSVKVSCKASGGTF | 126 | EIVLTQSPATLSLSPGERA | 127 |
| | SSYAISWVRQAPGQGLEWMGGIIPIFGTA | | TLSCRASQSVSKWLAWYQQ | |
| | NYAQKFQGRVTITADESTSTAYMELSSLR | | KPGQAPRLLIYDASNRATG | |
| | SEDTAVYYCARASRVWHASYGYLDYWGQG | | IPARFSGSGSGTDFTLTIS | |
| | TLVTVSS | | SLEPEDFAVYYCQQRFTAP | |
| | | | WTFGQGTKVEIK | |
| PSMB25 | EVQLVQSGAEVKKPGESLKISCKGSGYSF | 128 | DIVMTQSPDSLAVSLGERA | 129 |
| | TSYWIGWVRQMPGKGLEWMGIIYPGDSDT | | TINCKSSQSVLYSSNNKNY | |
| | RYSPSFQGQVTISADKSISTAYLQWSSLK | | LAWYQQKPGQPPKLLIYWA | |
| | ASDTAMYYCARGWAYDRGLDYWGQGTLVT | | STRESGVPDRFSGSGSGTD | |
| | VSS | | FTLTISSLQAEDVAVYYCQ | |
| | | | QYYSTPLTFGQGTKVEIK | |
| PSMB18 | EVQLVQSGAEVKKPGESLKISCKGSGYSF | 130 | DIVMTQSPDSLAVSLGERA | 131 |
| | TSYWIGWVRQMPGKGLEWMGIIYPGDSDT | | TINCKSSQSVLYSSNNKNY | |
| | RYSPSFQGQVTISADKSISTAYLQWSSLK | | LAWYQQKPGQPPKLLIYWA | |
| | ASDTAMYYCARAYHYSKGLDYWGQGTLVT | | STRESGVPDRFSGSGSGTD | |
| | VSS | | FTLTISSLQAEDVAVYYCQ | |
| | | | QYYSTPLTFGQGTKVEIK | |

TABLE 23
Heavy and Light chain sequences of PSMA monoclonal
antibodies with corresponding SEQ ID NOs

| | Heavy Chain | | Light Chain | |
|---|---|---|---|---|
| mAb ID | Amino acid sequence | SEQ ID NO | Amino Acid Sequence | SEQ ID NO |
| PSMB129 | [sequence omitted] | 132 | DIQMTQSPSSLSASVGDRVTIT | 133 |
| (FAB | GGTFSSYAISWVRQAPGQGLEWMGW | | CRASQSIDRWLNWYQQKPGKAP | |
| PSM109) | ISPYNGNANYAQKFQGRVTITADES | | KLLIYAASSLQSGVPSRFSGSG | |
| | TSTAYMELSSLRSEDTAVYYCARVN | | SGTDFTLTISSLQPEDFATYYC | |
| | SAALVWERLDYWGQGTLVTVSSAST | | QQSPRYPLTFGQGTKVEIKRTV | |
| | KGPSVFPLAPCSRSTSESTAALGCL | | AAPSVFIFPPSDEQLKSGTASV | |
| | VKDYFPEPVTVSWNSGALTSGVHTF | | VCLLNNFYPREAKVQWKVDNAL | |
| | PAVLQSSGLYSLSSVVTVPSSSLGT | | QSGNSQESVTEQDSKDSTYSLS | |
| | KTYTCNVDHKPSNTKVDKRVESKYG | | STLTLSKADYEKHKVYACEVTH | |
| | PPCPPCPAPEAAGGPSVFLFPPKPK | | QGLSSPVTKSFNRGEC | |
| | DTLMISRTPEVTCVVVDVSQEDPEV | | | |
| | QFNWYVDGVEVHNAKTKPREEQFNS | | | |
| | TYRVVSVLTVLHQDWLNGKEYKCKV | | | |
| | SNKGLPSSIEKTISKAKGQPREPQV | | | |
| | YTLPPSQEEMTKNQVSLTCLVKGFY | | | |
| | PSDIAVEWESNGQPENNYKTTPPVL | | | |
| | DSDGSFFLYSRLTVDKSRWQEGNVF | | | |
| | SCSVMHEALHNHYTQKSLSLSLGK | | | |
| PSMB130 | [sequence omitted] | 134 | EIVLTQSPGTLSLSPGERATLS | 135 |
| (FAB) | GGTFKSYDISWVRQAPGQGLEWMGG | | CRASQSVSSSYLAWYQQKPGQA | |
| PSMB86) | IIPIEGTANYAQKFQGRVTITADES | | PRLLIYGASSRATGIPDRFSGS | |
| | TSTAYMELSSLRSEDTAVYYCARDY | | GSGTDFTLTISRLEPEDFAVYY | |
| | PAGYGFDYWGQGTLVTVSSASTKGP | | CQQYGSSPLTFGQGTKVEIKRT | |
| | SVFPLAPCSRSTSESTAALGCLVKD | | VAAPSVFIFPPSDEQLKSGTAS | |
| | YFPEPVTVSWNSGALTSGVHTFPAV | | VVCLLNNFYPREAKVQWKVDNA | |
| | LQSSGLYSLSSVVTVPSSSLGTKTY | | LQSGNSQESVTEQDSKDSTYSL | |
| | TCNVDHKPSNTKVDKRVESKYGPPC | | SSTLTLSKADYEKHKVYACEVT | |
| | PPCPAPEAAGGPSVFLFPPKPKDTL | | HQGLSSPVTKSFNRGEC | |
| | MISRTPEVTCVVVDVSQEDPEVQFN | | | |
| | WYVDGVEVHNAKTKPREEQFNSTYR | | | |
| | VVSVLTVLHQDWLNGKEYKCKVSNK | | | |
| | GLPSSIEKTISKAKGQPREPQVYTL | | | |
| | PPSQEEMTKNQVSLTCLVKGFYPSD | | | |
| | IAVEWESNGQPENNYKTTPPVLDSD | | | |
| | GSFFLYSRLTVDKSRWQEGNVFSCS | | | |
| | VMHEALHNHYTQKSLSLSLGK | | | |
| PSMB128 | EVQLLESGGGLVQPGGSLRLSCAAS | 136 | DIQMTQSPSSLSASVGDRVTIT | 137 |
| (FAB) | GFTFDSDWMSWVRQAPGKGLEWVSA | | CRASQSISSYLNWYQQKPGKAP | |
| PSMB84) | ISGNGGSTEYADSVKGRFTISRDNS | | KLLIYAASSLQSGVPSRFSGSG | |
| | KNTLYLQMNSLRAEDTAVYYCARDP | | SGTDFTLTISSLQPEDFATYYC | |
| | YYYYDGDSYYGMDVWGQGTLVTVSS | | QQSYSTPLTFGQGTKVEIKRTV | |
| | ASTKGPSVFPLAPCSRSTSESTAAL | | AAPSVFIFPPSDEQLKSGTASV | |
| | GCLVKDYFPEPVTVSWNSGALTSGV | | VCLLNNFYPREAKVQWKVDNAL | |
| | HTFPAVLQSSGLYSLSSVVTVPSSS | | QSGNSQESVTEQDSKDSTYSLS | |
| | LGTKTYTCNVDHKPSNTKVDKRVES | | STLTLSKADYEKHKVYACEVTH | |
| | KYGPPCPPCPAPEAAGGPSVFLFPP | | QGLSSPVTKSFNRGEC | |
| | KPKDTLMISRTPEVTCVVVDVSQED | | | |
| | PEVQFNWYVDGVEVHNAKTKPREEQ | | | |
| | FNSTYRVVSVLTVLHQDWLNGKEYK | | | |
| | CKVSNKGLPSSIEKTISKAKGQPRE | | | |
| | PQVYTLPPSQEEMTKNQVSLTCLVK | | | |
| | GFYPSDIAVEWESNGQPENNYKTTP | | | |
| | PVLDSDGSFFLYSRLTVDKSRWQEG | | | |
| | NVFSCSVMHEALHNHYTQKSLSLSL | | | |
| | GK | | | |
| PSMB127 | EVQLLESGGGLVQPGGSLRLSCAAS | 138 | EIVLTQSPATLSLSPGERATLS | 139 |
| (FAB | GFTFKSDAMHWVRQAPGKGLEWVSE | | CRASQSVSSYLAWYQQKPGQAP | |
| PSMB83) | ISGSGGYTNYADSVKGRFTISRDNS | | RLLIYDASNRATGIPARFSGSG | |
| | KNTLYLQMNSLRAEDTAVYYCARDS | | SGTDFTLTISSLEPEDFAVYYC | |
| | YDSSLYVGDYFDYWGQGTLVTVSSA | | QQRSNWPLTFGQGTKVEIKRTV | |
| | STKGPSVFPLAPCSRSTSESTAALG | | AAPSVFIFPPSDEQLKSGTASV | |
| | CLVKDYFPEPVTVSWNSGALTSGVH | | VCLLNNFYPREAKVQWKVDNAL | |
| | TFPAVLQSSGLYSLSSVVTVPSSSL | | QSGNSQESVTEQDSKDSTYSLS | |
| | GTKTYTCNVDHKPSNTKVDKRVESK | | STLTLSKADYEKHKVYACEVTH | |
| | YGPPCPPCPAPEAAGGPSVFLFPPK | | QGLSSPVTKSFNRGEC | |
| | PKDTLMISRTPEVTCVVVDVSQEDP | | | |
| | EVQFNWYVDGVEVHNAKTKPREEQF | | | |
| | NSTYRVVSVLTVLHQDWLNGKEYKC | | | |
| | KVSNKGLPSSIEKTISKAKGQPREP | | | |
| | QVYTLPPSQEEMTKNQVSLTCLVKG | | | |
| | FYPSDIAVEWESNGQPENNYKTTPP | | | |
| | VLDSDGSFFLYSRLTVDKSRWQEGN | | | |
| | VFSCSVMHEALHNHYTQKSLSLSLG | | | |
| | K | | | |
| PSMB126 | [sequence omitted] | 140 | DIQMTQSPSSLSASVGDRVTIT | 137 |
| (FAB | GGTFDDYAISWVRQAPGQGLEWMGR | | CRASQSISSYLNWYQQKPGKAP | |
| PSMB80) | IDPIEGTANYAQKFQGRVTITADES | | KLLIYAASSLQSGVPSRFSGSG | |
| | TSTAYMELSSLRSEDTAVYYCARDR | | SGTDFTLTISSLQPEDFATYYC | |
| | YYYDGVYWYSDYFDYWGQGTLVTVS | | QQSYSTPLTFGQGTKVEIKRTV | |
| | SASTKGPSVFPLAPCSRSTSESTAA | | AAPSVFIFPPSDEQLKSGTASV | |
| | LGCLVKDYFPEPVTVSWNSGALTSG | | VCLLNNFYPREAKVQWKVDNAL | |
| | VHTFPAVLQSSGLYSLSSVVTVPSS | | QSGNSQESVTEQDSKDSTYSLS | |
| | SLGTKTYTCNVDHKPSNTKVDKRVE | | STLTLSKADYEKHKVYACEVTH | |
| | SKYGPPCPPCPAPEAAGGPSVFLFP | | QGLSSPVTKSFNRGEC | |
| | PKPKDTLMISRTPEVTCVVVDVSQE | | | |
| | DPEVQFNWYVDGVEVHNAKTKPREE | | | |
| | QFNSTYRVVSVLTVLHQDWLNGKEY | | | |
| | KCKVSNKGLPSSIEKTISKAKGQPR | | | |
| | EPQVYTLPPSQEEMTKNQVSLTCLV | | | |
| | KGFYPSDIAVEWESNGQPENNYKTT | | | |
| | PPVLDSDGSFFLYSRLTVDKSRWQE | | | |
| | GNVFSCSVMHEALHNHYTQKSLSLS | | | |
| | LGK | | | |
| PSMB124 | [sequence omitted] | 141 | DIQMTQSPSSLSASVGDRVTIT | 142 |
| (FAB | GGTFSSYAISWVRQAPGQGLEWMGW | | CRASQSISGWLNWYQQKPGKAP | |
| PSMB56) | ISPYNGNANYAQKFQGRVTITADES | | KLLIYAASSLQSGVPSRFSGSG | |
| | TSTAYMELSSLRSEDTAVYYCARDS | | SGTDFTLTISSLQPEDFATYYC | |
| | DRSYNLDYWGQGTLVTVSSASTKGP | | QQSYSTPLTFGQGTKVEIKRTV | |
| | SVFPLAPCSRSTSESTAALGCLVKD | | AAPSVFIFPPSDEQLKSGTASV | |
| | YFPEPVTVSWNSGALTSGVHTFPAV | | VCLLNNFYPREAKVQWKVDNAL | |
| | LQSSGLYSLSSVVTVPSSSLGTKTY | | QSGNSQESVTEQDSKDSTYSLS | |
| | TCNVDHKPSNTKVDKRVESKYGPPC | | STLTLSKADYEKHKVYACEVTH | |
| | PPCPAPEAAGGPSVFLFPPKPKDTL | | QGLSSPVTKSFNRGEC | |
| | MISRTPEVTCVVVDVSQEDPEVQFN | | | |
| | WYVDGVEVHNAKTKPREEQFNSTYR | | | |
| | VVSVLTVLHQDWLNGKEYKCKVSNK | | | |
| | GLPSSIEKTISKAKGQPREPQVYTL | | | |
| | PPSQEEMTKNQVSLTCLVKGFYPSD | | | |
| | IAVEWESNGQPENNYKTTPPVLDSD | | | |
| | GSFFLYSRLTVDKSRWQEGNVFSCS | | | |
| | VMHEALHNHYTQKSLSLSLGK | | | |
| PSMB123 | EVQLVQSGAEVKKPGESLKISCKGS | 143 | EIVLTQSPATLSLSPGERATLS | 144 |
| (FAB | GYSFTSYWIGWVRQMPGKGLEWMGI | | CRASQSVASDLAWYQQKPGQAP | |
| PSMB55) | IYPGDSDTRYSPSFQGQVTISADKS | | RLLIYFASNRATGIPARFSGSG | |
| | ISTAYLQWSSLKASDTAMYYCARGL | | SGTDFTLTISSLEPEDFAVYYC | |
| | PIWYLDYWGQGTLVTVSSASTKGPS | | QQSITWPFTFGQGTKVEIKRTV | |
| | VFPLAPCSRSTSESTAALGCLVKDY | | AAPSVFIFPPSDEQLKSGTASV | |
| | FPEPVTVSWNSGALTSGVHTFPAVL | | VCLLNNFYPREAKVQWKVDNAL | |
| | QSSGLYSLSSVVTVPSSSLGTKTYT | | QSGNSQESVTEQDSKDSTYSLS | |
| | CNVDHKPSNTKVDKRVESKYGPPCP | | STLTLSKADYEKHKVYACEVTH | |
| | PCPAPEAAGGPSVFLFPPKPKDTLM | | QGLSSPVTKSFNRGEC | |
| | ISRTPEVTCVVVDVSQEDPEVQFNW | | | |
| | YVDGVEVHNAKTKPREEQFNSTYRV | | | |
| | VSVLTVLHQDWLNGKEYKCKVSNKG | | | |
| | LPSSIEKTISKAKGQPREPQVYTLP | | | |
| | PSQEEMTKNQVSLTCLVKGFYPSDI | | | |
| | AVEWESNGQPENNYKTTPPVLDSDG | | | |
| | SFFLYSRLTVDKSRWQEGNVFSCSV | | | |
| | MHEALHNHYTQKSLSLSLGK | | | |
| PSMB122 | [sequence omitted] | 145 | DIQMTQSPSSLSASVGDRVTIT | 133 |
| (FAB | GGTFSSYAISWVRQAPGQGLEWMGW | | CRASQSIDRWLNWYQQKPGKAP | |
| PSMB51) | IIPYNGNANYAQKFQGRVTITADES | | KLLIYAASSLQSGVPSRFSGSG | |
| | TSTAYMELSSLRSEDTAVYYCARVN | | SGTDFTLTISSLQPEDFATYYC | |
| | SAALVWERLDYWGQGTLVTVSSAST | | QQSPRYPLTFGQGTKVEIKRTV | |
| | KGPSVFPLAPCSRSTSESTAALGCL | | AAPSVFIFPPSDEQLKSGTASV | |
| | VKDYFPEPVTVSWNSGALTSGVHTF | | VCLLNNFYPREAKVQWKVDNAL | |
| | PAVLQSSGLYSLSSVVTVPSSSLGT | | QSGNSQESVTEQDSKDSTYSLS | |
| | KTYTCNVDHKPSNTKVDKRVESKYG | | STLTLSKADYEKHKVYACEVTH | |
| | PPCPPCPAPEAAGGPSVFLFPPKPK | | QGLSSPVTKSFNRGEC | |
| | DTLMISRTPEVTCVVVDVSQEDPEV | | | |
| | QFNWYVDGVEVHNAKTKPREEQFNS | | | |
| | TYRVVSVLTVLHQDWLNGKEYKCKV | | | |
| | SNKGLPSSIEKTISKAKGQPREPQV | | | |
| | YTLPPSQEEMTKNQVSLTCLVKGFY | | | |
| | PSDIAVEWESNGQPENNYKTTPPVL | | | |
| | DSDGSFFLYSRLTVDKSRWQEGNVF | | | |
| | SCSVMHEALHNHYTQKSLSLSLGK | | | |
| PSMB121 | [sequence omitted] | 146 | EIVLTQSPATLSLSPGERATLS | 147 |
| (FAB | GGTFSSYAISWVRQAPGQGLEWMGG | | CRASQSVSKWLAWYQQKPGQAP | |
| PSMB49) | IIPIFGTANYAQKFQGRVTITADES | | RLLIYDASNRATGIPARFSGSG | |
| | TSTAYMELSSLRSEDTAVYYCARAS | | SGTDFTLTISSLEPEDFAVYYC | |
| | RVWHASYGYLDYWGQGTLVTVSSAS | | QQRFTAPWTFGQGTKVEIKRTV | |
| | TKGPSVFPLAPCSRSTSESTAALGC | | AAPSVFIFPPSDEQLKSGTASV | |
| | LVKDYFPEPVTVSWNSGALTSGVHT | | VCLLNNFYPREAKVQWKVDNAL | |
| | FPAVLQSSGLYSLSSVVTVPSSSLG | | QSGNSQESVTEQDSKDSTYSLS | |
| | TKTYTCNVDHKPSNTKVDKRVESKY | | STLTLSKADYEKHKVYACEVTH | |
| | GPPCPPCPAPEAAGGPSVFLFPPKP | | QGLSSPVTKSFNRGEC | |
| | KDTLMISRTPEVTCVVVDVSQEDPE | | | |
| | VQFNWYVDGVEVHNAKTKPREEQFN | | | |
| | STYRVVSVLTVLHQDWLNGKEYKCK | | | |
| | VSNKGLPSSIEKTISKAKGQPREPQ | | | |
| | VYTLPPSQEEMTKNQVSLTCLVKGF | | | |
| | YPSDIAVEWESNGQPENNYKTTPPV | | | |
| | LDSDGSFFLYSRLTVDKSRWQEGNV | | | |
| | FSCSVMHEALHNHYTQKSLSLSLGK | | | |
| PSMB120 | EVQLVQSGAEVKKPGESLKISCKGS | 148 | DIVMTQSPDSLAVSLGERATIN | 149 |
| (FAB | GYSFTSYWIGWVRQMPGKGLEWMGI | | CKSSQSVLYSSNNKNYLAWYQQ | |
| PSMB25) | IYPGDSDTRYSPSFQGQVTISADKS | | KPGQPPKLLIYWASTRESGVPD | |
| | ISTAYLQWSSLKASDTAMYYCARGW | | RFSGSGSGTDFTLTISSLQAED | |
| | AYDRGLDYWGQGTLVTVSSASTKGP | | VAVYYCQQYYSTPLTFGQGTKV | |
| | SVFPLAPCSRSTSESTAALGCLVKD | | EIKRTVAAPSVFIFPPSDEQLK | |
| | YFPEPVTVSWNSGALTSGVHTFPAV | | SGTASVVCLLNNFYPREAKVQW | |
| | LQSSGLYSLSSVVTVPSSSLGTKTY | | KVDNALQSGNSQESVTEQDSKD | |
| | TCNVDHKPSNTKVDKRVESKYGPPC | | STYSLSSTLTLSKADYEKHKVY | |
| | PPCPAPEAAGGPSVFLFPPKPKDTL | | ACEVTHQGLSSPVTKSFNRGEC | |
| | MISRTPEVTCVVVDVSQEDPEVQFN | | | |
| | WYVDGVEVHNAKTKPREEQFNSTYR | | | |
| | VVSVLTVLHQDWLNGKEYKCKVSNK | | | |
| | GLPSSIEKTISKAKGQPREPQVYTL | | | |
| | PPSQEEMTKNQVSLTCLVKGFYPSD | | | |
| | IAVEWESNGQPENNYKTTPPVLDSD | | | |
| | GSFFLYSRLTVDKSRWQEGNVFSCS | | | |
| | VMHEALHNHYTQKSLSLSLGK | | | |
| PSMB119 | EVQLVQSGAEVKKPGESLKISCKGS | 150 | DIVMTQSPDSLAVSLGERATIN | 149 |
| (FAB | GYSFTSYWIGWVRQMPGKGLEWMGI | | CKSSQSVLYSSNNKNYLAWYQQ | |
| PSMB18) | IYPGDSDTRYSPSFQGQVTISADKS | | KPGQPPKLLIYWASTRESGVPD | |
| | ISTAYLQWSSLKASDTAMYYCARAY | | RFSGSGSGTDFTLTISSLQAED | |
| | HYSKGLDYWGQGTLVTVSSASTKGP | | VAVYYCQQYYSTPLTFGQGTKV | |
| | SVFPLAPCSRSTSESTAALGCLVKD | | EIKRTVAAPSVFIFPPSDEQLK | |
| | YFPEPVTVSWNSGALTSGVHTFPAV | | SGTASVVCLLNNFYPREAKVQW | |
| | LQSSGLYSLSSVVTVPSSSLGTKTY | | KVDNALQSGNSQESVTEQDSKD | |
| | TCNVDHKPSNTKVDKRVESKYGPPC | | STYSLSSTLTLSKADYEKHKVY | |
| | PPCPAPEAAGGPSVFLFPPKPKDTL | | ACEVTHQGLSSPVTKSFNRGEC | |
| | MISRTPEVTCVVVDVSQEDPEVQFN | | | |
| | WYVDGVEVHNAKTKPREEQFNSTYR | | | |
| | VVSVLTVLHQDWLNGKEYKCKVSNK | | | |
| | GLPSSIEKTISKAKGQPREPQVYTL | | | |
| | PPSQEEMTKNQVSLTCLVKGFYPSD | | | |
| | IAVEWESNGQPENNYKTTPPVLDSD | | | |
| | GSFFLYSRLTVDKSRWQEGNVFSCS | | | |
| | VMHEALHNHYTQKSLSLSLGK | | | |
| PSMB87 | EVQLVQSGAEVKKPGESLKISCKGS | 151 | DIQMTQSPSSLSASVGDRVTIT | 137 |
| (FAB | GYSFTSYWISWVRQMPGKGLEWMGI | | CRASQSISSYLNWYQQKPGKAP | |
| PSMB58) | IYPGDSYTRYSPSFQGQVTISADKS | | KLLIYAASSLQSGVPSRFSGSG | |
| | ISTAYLQWSSLKASDTAMYYCARDY | | SGTDFTLTISSLQPEDFATYYC | |
| | EWELFDSRLDYWGQGTLVTVSSAST | | QQSYSTPLTFGQGTKVEIKRTV | |
| | KGPSVFPLAPCSRSTSESTAALGCL | | AAPSVFIFPPSDEQLKSGTASV | |
| | VKDYFPEPVTVSWNSGALTSGVHTF | | VCLLNNFYPREAKVQWKVDNAL | |
| | PAVLQSSGLYSLSSVVTVPSSSLGT | | QSGNSQESVTEQDSKDSTYSLS | |
| | KTYTCNVDHKPSNTKVDKRVESKYG | | STLTLSKADYEKHKVYACEVTH | |
| | PPCPPCPAPEAAGGPSVFLFPPKPK | | QGLSSPVTKSFNRGEC | |
| | DTLMISRTPEVTCVVVDVSQEDPEV | | | |
| | QFNWYVDGVEVHNAKTKPREEQFNS | | | |
| | TYRVVSVLTVLHQDWLNGKEYKCKV | | | |
| | SNKGLPSSIEKTISKAKGQPREPQV | | | |
| | YTLPPSQEEMTKNQVSLTCLVKGFY | | | |
| | PSDIAVEWESNGQPENNYKTTPPVL | | | |
| | DSDGSFFLYSRLTVDKSRWQEGNVF | | | |
| | SCSVMHEALHNHYTQKSLSLSLGK | | | |

[0706] A monospecific anti-PSMA antibody PSMB119 was generated comprising the VH and VL regions having the VH of SEQ ID NO: 130 and the VL of SEQ ID NO: 131 and an IgG4 constant region with S228P, F234A, and L235A substitutions. A monospecific anti-PSMA antibody PSMB120 was generated comprising the VH and VL regions having the VH of SEQ ID NO: 128 and the VL of SEQ ID NO: 129 and an IgG4 constant region with S228P, F234A, and L235A substitutions. A monospecific anti-PSMA antibody PSMB121 was generated comprising the VH and VL regions having the VH of SEQ ID NO: 126 and the VL of SEQ ID NO: 127 and an IgG4 constant region with S228P, F234A, and L235A substitutions. A monospecific anti-PSMA antibody PSMB122 was generated comprising the VH and VL regions having the VH of SEQ ID NO: 125 and the VL of SEQ ID NO: 111 and an IgG4 constant region with S228P, F234A, and L235A substitutions. A monospecific anti-PSMA antibody PSMB123 was generated comprising the VH and VL regions having the VH of SEQ ID NO: 123 and the VL of SEQ ID NO: 124 and an IgG4 constant region with S228P, F234A, and L235A substitutions. A monospecific anti-PSMA antibody PSMB124 was generated comprising the VH and VL regions having the VH of SEQ ID NO: 121 and the VL of SEQ ID NO: 122 and an IgG4 constant region with S228P, F234A, and L235A substitutions. A monospecific anti-PSMA antibody PSMB126 was generated comprising the VH and VL regions having the VH of SEQ ID NO: 118 and the VL of SEQ ID NO: 119 and an IgG4 constant region with S228P, F234A, and L235A substitutions. A monospecific anti-PSMA antibody PSMB127 was generated comprising the VH and VL regions having the VH of SEQ ID NO: 116 and the VL of SEQ ID NO: 117 and an IgG4 constant region with S228P, F234A, and L235A substitutions. A monospecific anti-PSMA antibody PSMB128 was generated comprising the VH and VL regions having the VH of SEQ ID NO: 114 and the VL of SEQ ID NO: 115 and an IgG4 constant region with S228P, F234A, and L235A substitutions. A monospecific anti-PSMA antibody PSMB129 was generated comprising the VH and VL regions having the VH of SEQ ID NO: 110 and the VL of SEQ ID NO: 111 and an IgG4 constant region with S228P, F234A, and L235A substitutions. A monospecific anti-PSMA antibody PSMB130 was generated comprising the VH and VL regions having the VH of SEQ ID NO: 112 and the VL of SEQ ID NO: 113 and an IgG4 constant region with S228P, F234A, and L235A substitutions.

[0707] 2-5 Crystal Structure of Human PSMA ECD Bound to Anti-PSMA Fab PSMB83 (Aka PSMM84)

[0708] PSMA is a homodimeric protein expressed on the cell surface. PSMA is a type II integral glycoprotein of 750 residues per monomer, comprised of a large ECD domain (705 residues) with peptidase activity, a single Pass™ domain, and a short 19 residue intracellular domain. The crystal structure of the extracellular region (ECD) of human PSMA bound to the anti-PSMA Fab arm of bispecific antibody PS3B27 was determined to 3.15 Å resolution to better understand the combining site between PSMA and the antibody.

[0709] The extracellular region of human PSMA (residues 44-750) was expressed in High Five™ insect cells with an N-terminal gp67 signal peptide followed by a cleavable hexahistidine tag (SEQ ID NO: 596). The secreted protein was purified from supernatant by a three-step procedure comprising of an initial Ni²⁺-NTA affinity capture, TEV-mediated cleavage of the histidine tag followed by an inverse affinity chromatography step, and a final size-exclusion chromatography step. Purified PSMA-ECD was flash-frozen in liquid nitrogen and stored at −80° C. in 10 mM HEPES pH 7.4, 150 mM NaCl, 2 mM CaCl₂, 0.1 mM ZnCl₂

[0710] The Fab of PSMB83 (aka PSMM84), which is the parental anti-PSMA Fab arm in bispecific antibody PS3B27, was expressed in HEK293 Expi cells with a hexahistidine tag (SEQ ID NO: 596) and purified using affinity (HisTrap, GE Healthcare) and size-exclusion chromatography (SEC-300, Phenomenex Yarra). The Fab was stored at 4° C. in 50 mM NaCl, 20 mM Tris pH 7.4

[0711] The human PSMA ECD/PSMB83 Fab complex was prepared by a three-step procedure. First, the Fab was buffer exchanged into 20 mM MES pH 6.0, 150 mM NaCl. Then, the Fab and PSMA were mixed (1.5 molar excess Fab over PSMA monomer) and incubated overnight at 4° C. while dialyzing into 20 mM MES pH 6.0. Finally, the complex was bound to a monoS 5/50 column in 20 mM MES pH 6.0 and eluted with a NaCl gradient.

[0712] Crystals suitable for X-ray diffraction were obtained using the sitting drop vapor-diffusion method at 20° C. and a Mosquito LCP robot (TTP Labtech). Crystals of PSMB83 Fab bound to human PSMA ECD were grown from 18% PEG 3 kDa, 0.2 M (NH₄)₂SO₄, 0.1 M Tris pH 8.5 with micro-seeds and the PSMA/Fab complex initially at 7.3 mg/mL. Crystals of free PSMB83 Fab were obtained from 25% PEG 3 kDa, 0.2 M LiCl, 0.1 M acetate pH 4.5 with the Fab initially at 8.8 mg/mL.

[0713] The structures were solved by molecular replacement (MR) with Phaser (Phaser Crystallographic Software, University of Cambridge). The MR search model for the PSMB83 (aka PSMM84) Fab structure was PDB code 4M60. The PSMA/Fab complex structure was solved using the crystal structures of PSMA (PDB code: 2C6G) and PSMB83 Fab (structure at 1.93 Å resolution; data not shown) as MR search models. The structures were refined with PHENIX (Adams, et al, 2004) and model adjustments were carried out using COOT (Emsley and Cowtan, 2004). All other crystallographic calculations were performed with the CCP4 suite of programs (Collaborative Computational Project Number 4, 1994). All molecular graphics were generated with PyMol (PyMOL Molecular Graphics System, Version 1.4.1, Schrödinger, LLC.) and complementarity determining regions (CDRs) were determined using the Kabat definition.

[0714] The PSMA/Fab structure includes Fab light chain residues 1-211, Fab heavy chain residues 1-224 (except for residues 138-146, which are disordered) and PSMA residues 56-750, which corresponds to the protease (residues 56-116 and 352-590), apical (residues 117-351) and helical (residues 591-750) domains, and seven often possible N-linked glycans (in Asn-76, -121, -140, -195, -459, -476, and -638) per PSMA dimer subunit. The PSMA active site is located at the interface between the three domains and it contains two zinc atoms coordinated by histidine (H377 and H553) and glutamate/aspartate (D387, catalytic E424, E425, and D453) residues and a water molecule. The crystal asymmetric unit contains one PSMA dimer with each subunit bound in a similar manner to a PSMB83 Fab. The Fab/PSMA combining site is well defined by the electron density map, which allows reliable positioning of the binding residues. The Fab and PSMA molecules are numbered sequentially in FIG. 25-FIG. 30.

[0715] The PSMB83 epitope, paratope and interactions. PSMB83, which is the parental anti-PSMA Fab arm in bispecific antibody PS3B27, recognizes a conformational and discontinuous epitope in the apical domain of PSMA (FIG. 25). The PSMA surface area buried by the Fab is around 700 Å². Specifically, the PSMB83 epitope residues are 1138, F235, P237, G238, D244, Y299, Y300, Q303, K304, E307, and K324-P326. Helix α7 (residues Y299-E307) is a prevalent region of the epitope and binds across the Fab heavy and light chain CDRs. At one end of the helix, Y299 and Y300 form an aromatic cluster with Fab residues Y57^{H}, W94^{L} and PSMA residues F235 and P237, while E307, at the other helix end, forms a salt bridge with R91^{L} and hydrogen bonds Y32^{L}. FIG. 26 and FIG. 27 show the main interactions of PSMA with the PSMB83 light and heavy chains. The PSMB83 epitope residues are conserved between human and cynomolgus monkey (FIG. 28) and the bispecific antibody PS3B27 was demonstrated to bind with similar affinity to human and cyno PSMA. In contrast, the human to mouse G238A and, especially, Y300D epitope mutations are expected to lower PSMB83 binding affinity to mouse PSMA in comparison to human. The Y300D mutation disrupts a hydrogen bond contact with N59^{H} and a π stacking interaction with W94^{L}.

[0716] The PSMB83 paratope is composed of residues from all CDRs except CDR-L2 and CDR-H1 (FIG. 29). Specifically, the paratope residues are light chain S30^{L}, Y32^{L}, R91^{L}, S92^{L}, W94^{L}, and heavy chain G56^{H}-N59^{H}, K65^{H}, G66^{H}, Y101^{H}, V107^{H}, and D109^{H}. FIG. 30 shows the interaction contacts between PSMA and PSMB83. The accessible location of the epitope facilitates binding of the PSMB83 Fab arm in the PS3B27 bispecific antibody to membrane-bound PSMA, while the other Fab arm is still bound to CD3 in the T-cell membrane. PSMB83 is not expected to inhibit PSMA enzymatic activity since the antibody binds away from the active site and does not cause any significant structural changes in PSMA that could affect enzymatic function, such as loop movements that close the active site or displacement of catalytic residues (RMSD of 0.3 Å for Cα superposition of PSMA molecules in Fab bound and unbound (Barinka et al, 2007) structures).

[0717] 2-6 Anti-PSMA Affinity Maturation

[0718] Affinity maturation was performed on anti-PSMA Fab phage clones from two PSMA affinity maturation libraries to identify an antibody with increased binding affinity compared to the parental PSMB127 (fab ID=PSMB83, aka PSMM84). Two libraries were generated for affinity maturation of PSMB127). In the first library heavy chain CDR1 and CDR2 were randomized according to the design in Table 24 (PH9H9L1). The H-CDR3 fragment was PCR amplified from pDR000024032 and digested with SacII+XhoI. This fragment was cloned into the PH9H9L1/PH9L3 library. This was transformed into E. coli MC1061F′ cells and phage was generated displaying this Fab library. In the second library light chain CDRs were randomized according to the design in Table 25 (PH9L3L3). The heavy chain from PSMB83 (PSMH360) was PCR amplified and digested with NcoI+XhoI. This fragment was cloned into the PH9L3L3 library DNA (ELN: De Novo 2010 phage library SRI-021). This was transformed into E. coli MC1061F′ cells and phage was generated displaying this Fab library.

TABLE 24
PH9H9L1 Library design

| Position | Parent AA | Library AA |
|---|---|---|
| 30 | S | D, K, S |
| 31 | S | D, N, S, T |
| 32 | Y | A, D, S, Y |
| 33 | A | A, D, G, S, W, Y |
| 35 | S | H, N, S |
| 50 | A | A, E, L, N, R, T, W, Y |
| 52 | S | A, D, L, N, R, S |
| 54 | S | A, E, N, S, Y |
| 57 | S | D, N, R, S, T, Y |
| 59 | Y | E, G, N, Q, R, Y |

TABLE 25
PH9L3L3 Library design

| Position | Parent AA | Library AA |
|---|---|---|
| 30 | S | D, N, R, S |
| 31 | S | N, S, T |
| 32 | Y | D, N, R, S, Y |
| 49 | Y | E, H, K, Y |
| 50 | D | D, G, S, W, Y |
| 53 | N | D, N, S, T, Y |
| 91 | R | A, D, E, G, H, N, R, S, W, Y |
| 92 | S | A, D, E, G, H, N, R, S, W, Y |
| 93 | N | A, D, E, G, H, N, R, S, W, Y |
| 94 | W | A, D, E, G, H, N, R, S, W, Y |
| 96 | L | F, I, L, N, R, W, Y |

[0719] A solution panning of the PSMA affinity maturation Fab-pIX libraries was performed against biotinylated human PSMA ECD for three rounds. The phage-bound antigen was captured on neutravidin beads (GE HealthCare Life Science Cat #78152104011150) according to the manufacturer's protocol, followed by extensive washes in 1×PBST (0.05% tween 20) and an hour-long incubation with unlabeled PSMA ECD in 500-fold molar excess of the biotinylated antigen. This panning yielded the clones, PSMXP46R3_59H09, PSMXP46R3_59H06, PSMXP46R3_59E03, PSMXP46R3_59C09, PSMXP46R3_59H01, PSMXP46R3_59F11, and PSMXP46R3_59F07.

[0720] To determine the expression level of the anti-PSMA fab clones, 96 well Maxisorb plates were coated overnight at 4 C with anti-human Fd IgG, washed, and blocked with 3% milk-PBS-0.05% Tween for 1 hour. The phage supernatant samples were serially diluted 2-fold for 11 dilutions in blocking buffer with the final well blank. 100 ul of these solutions were captured on the coated plates for 1 hour. The plates were washed and 100 ul of anti-F(ab′)2-HRP antibody was added for 1 hour. Plates were washed and developed with 100 ul of peroxidase reagent and luminescence was read on the Envision (FIG. 31).

[0721] To determine the binding of the anti-PSMA fab clones to human and cynomolgus recombinant protein, 96 well Maxisorb plates were coated with 100 ul of 5 ug/ml neutravidin overnight at 4 C. The plates were washed and blocked with 3% milk-PBS-0.05% Tween for 1 hour. Recombinant biotinylated human and cynomolgus PSMA proteins were captured at 2.5 ug/ml for 1 hour at room temperature. The plates were washed and 100 ul of 2-fold serially diluted fab supernatant was capture for 1 hour at RT. The plate was washed and then there was a 2.5-hour incubation with 200 ul 0.3% milk in PBST to wash away some of the weak affinity fabs. Then there was another 30 minutes incubation with fresh 200 ul 0.3% milk in PBST to remove more weak affinity fabs. The plates were washed and 100 ul of anti-F(ab′)2-HRP antibody was added for 1 hour. Plates were washed and developed with 100 ul of peroxidase reagent and luminescence was read on the Envision (FIG. 32 and FIG. 33).

[0722] FIG. 31 demonstrates that the protein expression of the parental Fab and affinity matured Fabs were similar. The y axis values represent the luminescence of the detection reagent which equates to the abundance of fab protein over the dilution curve; the higher the luminescence reading, the more protein in the well which decreased with successive two-fold dilutions. There was more protein in the wells with affinity mature fabs but the increase over the parental is at most five times greater as demonstrated by the EC50 values (which is the concentration of protein that gives half of the maximal response). These data demonstrate the difference in PSMA binding profiles in FIG. 32 and FIG. 33 is not due to a difference in Fab concentration.

[0723] FIG. 32 demonstrates improved binding of the affinity matured Fabs to the human recombinant antigen over the parental anti-PSMA Fab (PSMB83). Again, the y axis of the graph represents luminescence values. In this case the larger the value means more Fab bound to the human PSMA protein. This is a measure of binding as increased concentrations of Fab (along the x axis) generate higher luminescence values. There was negligible binding of the parental Fab under these conditions as demonstrated by the absence of signal even at high concentrations (open circles along the x axis). Binding of the affinity matured fabs was observed over the concentrations tested which equates to stronger binding capacity to the human PSMA protein. Given that parental Fab binding to human PSMA protein was zero, no EC50 could be generated.

[0724] FIG. 33 demonstrates improved binding of the affinity matured Fabs to the cynomolgus recombinant antigen over the parental anti-PSMA Fab (PSMB83). Again, the y axis of the graph represents luminescence values. In this case the larger the value means more Fab bound to the cynomolgus PSMA protein. This is a measure of binding as increased concentrations of Fab (along the x axis) generate higher luminescence values. There was negligible binding of the parental Fab under these conditions as demonstrated by the absence of signal even at high concentrations (open circles along the x axis). Binding of the affinity matured Fabs was observed over the concentrations tested which equates to stronger binding capacity to the human PSMA protein. Given that parental Fab binding to human PSMA protein was zero, no EC50 could be generated for direct comparison.

[0725] Overall, the phages' Fab binding profiles demonstrate improved binding to the human and cynomolgus recombinant antigen over the parental anti-PSMA mAb (PSMB127). This improvement is not a result of differences in Fab expression profiles, as demonstrated by FIG. 33 and FIG. 34, showing binding of affinity mature Fabs normalized to Fab expression levels. The top five Fab candidates identified from the ELISA screen were produced in monoclonal antibody format on IgG4 PAA. Table 26 lists the subsequent Mab identifiers and Tables 27 and 28 depict sequences for their variable regions and the sequences for the heavy and light chains, respectively.

TABLE 26
Top five affinity mature antibodies identified based on the ELISA

| | HC | LC | |
|---|---|---|---|
| Well ID | SEQ ID | SEQ ID | MAB protein IDs |
| PSMXP46R3_59C09 | PSMH859 | PSML160 | PSMB346 |
| PSMXP46R3_59E03 | PSMH859 | PSML159 | PSMB345 |
| PSMXP46R3_59F07 | PSMH862 | PSML158 | PSMB349 |
| PSMXP46R3_59H01 | PSMH860 | PH9L3 | PSMB347 |
| PSMXP46R3_59H06 | PSMH859 | PH9L3 | PSMB344 |

TABLE 28
VH and VL sequences of top five PSMA Fab candidates

| MAB ID | VH Amino acid sequence | SEQ ID NO | VL Amino Acid Sequence | SEQ ID NO |
|---|---|---|---|---|
| PSMB344 | EVQLLESGGGLVQPGGSLRLSCAASG | 6 | EIVLTQSPATLSLSPGERATLS | 117 |
| | FTFKSDAMHWVRQAPGKGLEWVSEIS | | CRASQSVSSYLAWYQQKPGQAP | |
| | GSGGYTNYADSMKGRFTISRDNSKNT | | RLLIYDASNRATGIPARFSGSG | |
| | LYLQMNSLRAEDTAVYYCARDSYDSS | | SGTDFTLTISSLEPEDFAVYYC | |
| | LYVGDYFDYWGQGTLVTVSS | | QQRSNWPLTFGQGTKVEIK | |
| PSMB345 | EVQLLESGGGLVQPGGSLRLSCAASG | 6 | EIVLTQSPATLSLSPGERATLS | 9 |
| | FTFKSDAMHWVRQAPGKGLEWVSEIS | | CRASQSVSNYLAWYQQKPGQAP | |
| | GSGGYTNYADSMKGRFTISRDNSKNT | | RLLIHDASNRATGIPARFSGSG | |
| | LYLQMNSLRAEDTAVYYCARDSYDSS | | SGTDFTLTISSLEPEDFAVYYC | |
| | LYVGDYFDYWGQGTLVTVSS | | QQRRNWPLTFGQGTKVEIK | |
| PSMB346 | EVQLLESGGGLVQPGGSLRLSCAASG | 6 | EIVLTQSPATLSLSPGERATLS | 682 |
| | FTFKSDAMHWVRQAPGKGLEWVSEIS | | CRASQSVSSYLAWYQQKPGQAP | |
| | GSGGYTNYADSMKGRFTISRDNSKNT | | RLLIYDASYRATGIPARFSGSG | |
| | LYLQMNSLRAEDTAVYYCARDSYDSS | | SGTDFTLTISSLEPEDFAVYYC | |
| | LYVGDYFDYWGQGTLVTVSS | | QQRRNWPLTFGQGTKVEIK | |
| PSMB347 | EVQLLESGGGLVQPGGSLRLSCAASG | 7 | EIVLTQSPATLSLSPGERATLS | 117 |
| | FTFKSDAMHWVRQAPGKGLEWVSEIS | | CRASQSVSSYLAWYQQKPGQAP | |
| | GSGGYTNYADSMKSRFTISRDNSKNT | | RLLIYDASNRATGIPARFSGSG | |
| | LYLQMNSLRAEDTAVYYCARDSYDSS | | SGTDFTLTISSLEPEDFAVYYC | |
| | LYVGDYFDYWGQGTLVTVSS | | QQRSNWPLTFGQGTKVEIK | |
| PSMB349 | EVQLLESGGGLVQPGGSLRLSCAASG | 8 | EIVLTQSPATLSLSPGERATLS | 10 |
| | FTFKSDAMHWVRQAPGKGLEWVSEIS | | CRASQSVSSYLAWYQQKPGQAP | |
| | GSGGYTNYADSLKGRFTISRDNSKNT | | RLLIYDASNRATGIPARFSGSG | |
| | LYLQMNSLRAEDTAVYYCARDSYDSS | | SGTDFTLTISSLEPEDFAVYYC | |
| | LYVGDYFDYWGQGTLVTVSS | | QQRGNWPLTFGQGTKVEIK | |

TABLE 28
Heavy Chain and Light Chain sequences of top
five PSMA candidatesin monoclonal antibody
format on IgG4 PAA

| | | SEQ | Light Chain | SEQ |
|---|---|---|---|---|
| | Heavy Chain Amino | ID | Amino Acid | ID |
| mAb ID | acid sequence | NO | Sequence | NO |
| PSMB344 | EVQLLESGGGLVQPGGSLRLSCAA | 11 | EIVLTQSPATL | 139 |
| | SGFTFKSDAMHWVRQAPGKGLEWV | | SLSPGERATLS | |
| | SEISGSGGYTNYADSMKGRFTISR | | CRASQSVSSYL | |
| | DNSKNTLYLQMNSLRAEDTAVYYC | | AWYQQKPGQAP | |
| | ARDSYDSSLYVGDYFDYWGQGTLV | | RLLIYDASNRA | |
| | TVSSASTKGPSVFPLAPCSRSTSE | | TGIPARFSGSG | |
| | STAALGCLVKDYFPEPVTVSWNSG | | SGTDFTLTISS | |
| | ALTSGVHTFPAVLQSSGLYSLSSV | | LEPEDFAVYYC | |
| | VTVPSSSLGTKTYTCNVDHKPSNT | | QQRSNWPLTFG | |
| | KVDKRVESKYGPPCPPCPAPEAAG | | QGTKVEIKRTV | |
| | GPSVFLFPPKPKDTLMISRTPEVT | | AAPSVFIFPPS | |
| | CVVVDVSQEDPEVQFNWYVDGVEV | | DEQLKSGTASV | |
| | HNAKTKPREEQFNSTYRVVSVLTV | | VCLLNNFYPRE | |
| | LHQDWLNGKEYKCKVSNKGLPSSI | | AKVQWKVDNAL | |
| | EKTISKAKGQPREPQVYTLPPSQE | | QSGNSQESVTE | |
| | EMTKNQVSLTCLVKGFYPSDIAVE | | QDSKDSTYSLS | |
| | WESNGQPENNYKTTPPVLDSDGSF | | STLTLSKADYE | |
| | FLYSRLTVDKSRWQEGNVFSCSVM | | KHKVYACEVTH | |
| | HEALHNHYTQKSLSLSLGK | | QGLSSPVTKSF | |
| | | | NRGEC | |
| PSMB345 | EVQLLESGGGLVQPGGSLRLSCAA | 11 | EIVLTQSPATL | 14 |
| | SGFTFKSDAMHWVRQAPGKGLEWV | | SLSPGERATLS | |
| | SEISGSGGYTNYADSMKGRFTISR | | CRASQSVSNYL | |
| | DNSKNTLYLQMNSLRAEDTAVYYC | | AWYQQKPGQAP | |
| | ARDSYDSSLYVGDYFDYWGQGTLV | | RLLIHDASNRA | |
| | TVSSASTKGPSVFPLAPCSRSTSE | | TGIPARFSGSG | |
| | STAALGCLVKDYFPEPVTVSWNSG | | SGTDFTLTISS | |
| | ALTSGVHTFPAVLQSSGLYSLSSV | | LEPEDFAVYYC | |
| | VTVPSSSLGTKTYTCNVDHKPSNT | | QQRRNWPLTFG | |
| | KVDKRVESKYGPPCPPCPAPEAAG | | QGTKVEIKRTV | |
| | GPSVFLEPPKPKDTLMISRTPEVT | | AAPSVFIFPPS | |
| | CVVVDVSQEDPEVQFNWYVDGVEV | | DEQLKSGTASV | |
| | HNAKTKPREEQFNSTYRVVSVLTV | | VCLLNNFYPRE | |
| | LHQDWLNGKEYKCKVSNKGLPSSI | | AKVQWKVDNAL | |
| | EKTISKAKGQPREPQVYTLPPSQE | | QSGNSQESVTE | |
| | EMTKNQVSLTCLVKGFYPSDIAVE | | QDSKDSTYSLS | |
| | WESNGQPENNYKTTPPVLDSDGSF | | STLTLSKADYE | |
| | FLYSRLTVDKSRWQEGNVFSCSVM | | KHKVYACEVTH | |
| | HEALHNHYTQKSLSLSLGK | | QGLSSPVTKSF | |
| | | | NRGEC | |
| PSMB346 | EVQLLESGGGLVQPGGSLRLSC | 11 | EIVLTQSPATL | 680 |
| | AASGFTFKSDAMHWVRQAPGKG | | SLSPGERATLS | |
| | LEWVSEISGSGGYTNYADSMKG | | CRASQSVSSYL | |
| | RFTISRDNSKNTLYLQMNSLRA | | AWYQQKPGQAP | |
| | EDTAVYYCARDSYDSSLYVGDY | | RLLIYDASYRA | |
| | FDYWGQGTLVTVSSASTKGPSV | | TGIPARFSGSG | |
| | FPLAPCSRSTSESTAALGCLVK | | SGTDFTLTISS | |
| | DYFPEPVTVSWNSGALTSGVHT | | LEPEDFAVYYC | |
| | FPAVLQSSGLYSLSSVVTVPSS | | QQRRNWPLTFG | |
| | SLGTKTYTCNVDHKPSNTKVDK | | QGTKVEIKRTV | |
| | RVESKYGPPCPPCPAPEAAGGP | | AAPSVFIFPPS | |
| | SVFLFPPKPKDTLMISRIPEVT | | DEQLKSGTASV | |
| | CVVVDVSQEDPEVQFNWYVDGV | | VCLLNNFYPRE | |
| | EVHNAKTKPREEQFNSTYRVVS | | AKVQWKVDNAL | |
| | VLTVLHQDWLNGKEYKCKVSNK | | QSGNSQESVTE | |
| | GLPSSIEKTISKAKGQPREPQV | | QDSKDSTYSLS | |
| | YTLPPSQEEMTKNQVSLTCLVK | | STLTLSKADYE | |
| | GFYPSDIAVEWESNGQPENNYK | | KHKVYACEVTH | |
| | TTPPVLDSDGSFFLYSRLTVDK | | QGLSSPVTKSF | |
| | SRWQEGNVFSCSVMHEALHNHY | | NRGEC | |
| | TQKSLSLSLGK | | | |
| PSMB347 | EVQLLESGGGLVQPGGSLRLSC | 12 | EIVLTQSPATL | 139 |
| | AASGFTFKSDAMHWVRQAPGKG | | SLSPGERATLS | |
| | LEWVSEISGSGGYTNYADSMKS | | CRASQSVSSYL | |
| | RFTISRDNSKNTLYLQMNSLRA | | AWYQQKPGQAP | |
| | EDTAVYYCARDSYDSSLYVGDY | | RLLIYDASNRA | |
| | FDYWGQGTLVTVSSASTKGPSV | | TGIPARFSGSG | |
| | FPLAPCSRSTSESTAALGCLVK | | SGTDFTLTISS | |
| | DYFPEPVTVSWNSGALTSGVHT | | LEPEDFAVYYC | |
| | FPAVLQSSGLYSLSSVVTVPSS | | QQRSNWPLTFG | |
| | SLGTKTYTCNVDHKPSNTKVDK | | QGTKVEIKRTV | |
| | RVESKYGPPCPPCPAPEAAGGP | | AAPSVFIFPPS | |
| | SVFLFPPKPKDTLMISRIPEVT | | DEQLKSGTASV | |
| | CVVVDVSQEDPEVQFNWYVDGV | | VCLLNNFYPRE | |
| | EVHNAKTKPREEQFNSTYRVVS | | AKVQWKVDNAL | |
| | VLTVLHQDWLNGKEYKCKVSNK | | QSGNSQESVTE | |
| | GLPSSIEKTISKAKGQPREPQV | | QDSKDSTYSLS | |
| | YTLPPSQEEMTKNQVSLTCLVK | | STLTLSKADYE | |
| | GFYPSDIAVEWESNGQPENNYK | | KHKVYACEVTH | |
| | TTPPVLDSDGSFFLYSRLTVDK | | QGLSSPVTKSF | |
| | SRWQEGNVFSCSVMHEALHNHY | | NRGEC | |
| | TQKSLSLSLGK | | | |
| PSMB349 | EVQLLESGGGLVQPGGSLRLSC | 13 | EIVLTQSPATL | 15 |
| | AASGFTFKSDAMHWVRQAPGKG | | SLSPGERATLS | |
| | LEWVSEISGSGGYTNYADSLKG | | CRASQSVSSYL | |
| | RFTISRDNSKNTLYLQMNSLRA | | AWYQQKPGQAP | |
| | EDTAVYYCARDSYDSSLYVGDY | | RLLIYDASNRA | |
| | FDYWGQGTLVTVSSASTKGPSV | | TGIPARFSGSG | |
| | FPLAPCSRSTSESTAALGCLVK | | SGTDFTLTISS | |
| | DYFPEPVTVSWNSGALTSGVHT | | LEPEDFAVYYC | |
| | FPAVLQSSGLYSLSSVVTVPSS | | QQRGNWPLTFG | |
| | SLGTKTYTCNVDHKPSNTKVDK | | QGTKVEIKRTV | |
| | RVESKYGPPCPPCPAPEAAGGP | | AAPSVFIFPPS | |
| | SVFLFPPKPKDTLMISRIPEVT | | DEQLKSGTASV | |
| | CVVVDVSQEDPEVQFNWYVDGV | | VCLLNNFYPRE | |
| | EVHNAKTKPREEQFNSTYRVVS | | AKVQWKVDNAL | |
| | VLTVLHQDWLNGKEYKCKVSNK | | QSGNSQESVTE | |
| | GLPSSIEKTISKAKGQPREPQV | | QDSKDSTYSLS | |
| | YTLPPSQEEMTKNQVSLTCLVK | | STLTLSKADYE | |
| | GFYPSDIAVEWESNGQPENNYK | | KHKVYACEVTH | |
| | TTPPVLDSDGSFFLYSRLTVDK | | QGLSSPVTKSF | |
| | SRWQEGNVFSCSVMHEALHNHY | | NRGEC | |
| | TQKSLSLSLGK | | | |

[0726] The 3 different HC and 4 different LC were combined in a matrix format to expand the diversity of hits (Table 29). Given that the methionine in the CDR2 of PSMH860 is a posttranslational risk, a new sequence was generated with M64L and identified as PSMH865. PSMH865 was paired with PSML160 to generate Mab PSMB365.

TABLE 29
Matrix format of the 3 heavy chains and 4 light chains combined

| | PSMH859 | PSMH860 | PSMH862 |
|---|---|---|---|
| PH9L3 | PSMB344 | PSMB347 | PSMB358 |
| PSML158 | — | PSMB361 | PSMB349 |
| PSML159 | PSMB345 | PSMB362 | PSMB359 |
| PSML160 | PSMB346 | PSMB363 | PSMB360 |

Tables 30 and 31 depict the sequences for the matrix recombined variable regions and the sequences for the heavy and light chains, respectively.

TABLE 30
VH and VL sequences of matrix recombined
PSMA hits

| | | SEQ | | SEQ |
|---|---|---|---|---|
| | VH Amino acid | ID | VL Amino Acid | ID |
| MAB ID | sequence | NO | Sequence | NO |
| PSMB358 | EVQLLESGGGLVQPGG | 8 | EIVLTQSPATLSLSPGE | 117 |
| | SLRLSCAASGFTFKSD | | RATLSCRASQSVSSYLA | |
| | AMHWVRQAPGKGLEWV | | WYQQKPGQAPRLLIYDA | |
| | SEISGSGGYTNYADSL | | SNRATGIPARFSGSGSG | |
| | KGRFTISRDNSKNTLY | | TDFTLTISSLEPEDFAV | |
| | LQMNSLRAEDTAVYYC | | YYCQQRSNWPLTFGQGT | |
| | ARDSYDSSLYVGDYFD | | KVEIK | |
| | YWGQGTLVTVSS | | | |
| PSMB359 | EVQLLESGGGLVQPGG | 8 | EIVLTQSPATLSLSPGE | 9 |
| | SLRLSCAASGFTFKSD | | RATLSCRASQSVSNYLA | |
| | AMHWVRQAPGKGLEWV | | WYQQKPGQAPRLLIHDA | |
| | SEISGSGGYTNYADSL | | SNRATGIPARFSGSGSG | |
| | KGRFTISRDNSKNTLY | | TDFTLTISSLEPEDFAV | |
| | LQMNSLRAEDTAVYYC | | YYCQQRRNWPLTFGQGT | |
| | ARDSYDSSLYVGDYFD | | KVEIK | |
| | YWGQGTLVTVSS | | | |
| PSMB360 | EVQLLESGGGLVQPGG | 8 | EIVLTQSPATLSLSPGE | 682 |
| | SLRLSCAASGFTFKSD | | RATLSCRASQSVSSYLA | |
| | AMHWVRQAPGKGLEWV | | WYQQKPGQAPRLLIYDA | |
| | SEISGSGGYTNYADSL | | SYRATGIPARFSGSGSG | |
| | KGRFTISRDNSKNTLY | | TDFTLTISSLEPEDFAV | |
| | LQMNSLRAEDTAVYYC | | YYCQQRRNWPLTFGQGT | |
| | ARDSYDSSLYVGDYFD | | KVEIK | |
| | YWGQGTLVTVSS | | | |
| PSMB361 | EVQLLESGGGLVQPGG | 7 | EIVLTQSPATLSLSPGE | 10 |
| | SLRLSCAASGFTFKSD | | RATLSCRASQSVSSYLA | |
| | AMHWVRQAPGKGLEWV | | WYQQKPGQAPRLLIYDA | |
| | SEISGSGGYTNYADSM | | SNRATGIPARFSGSGSG | |
| | KSRFTISRDNSKNTLY | | TDFTLTISSLEPEDFAV | |
| | LQMNSLRAEDTAVYYC | | YYCQQRGNWPLTFGQGT | |
| | ARDSYDSSLYVGDYFD | | KVEIK | |
| | YWGQGTLVTVSS | | | |
| PSMB362 | EVQLLESGGGLVQPGG | 7 | EIVLTQSPATLSLSPGE | 9 |
| | SLRLSCAASGFTFKSD | | RATLSCRASQSVSNYLA | |
| | AMHWVRQAPGKGLEWV | | WYQQKPGQAPRLLIHDA | |
| | SEISGSGGYTNYADSM | | SNRATGIPARFSGSGSG | |
| | KSRFTISRDNSKNTLY | | TDFTLTISSLEPEDFAV | |
| | LQMNSLRAEDTAVYYC | | YYCQQRRNWPLTFGQGT | |
| | ARDSYDSSLYVGDYFD | | KVEIK | |
| | YWGQGTLVTVSS | | | |
| PSMB363 | EVQLLESGGGLVQPGG | 7 | EIVLTQSPATLSLSPGE | 682 |
| | SLRLSCAASGFTFKSD | | RATLSCRASQSVSSYLA | |
| | AMHWVRQAPGKGLEWV | | WYQQKPGQAPRLLIYDA | |
| | SEISGSGGYTNYADSM | | SYRATGIPARFSGSGSG | |
| | KSRFTISRDNSKNTLY | | TDFTLTISSLEPEDFAV | |
| | LQMNSLRAEDTAVYYC | | YYCQQRRNWPLTFGQGT | |
| | ARDSYDSSLYVGDYFD | | KVEIK | |
| | YWGQGTLVTVSS | | | |
| PSMB365 | EVQLLESGGGLVQPGG | 681 | EIVLTQSPATLSLSPGE | 682 |
| | SLRLSCAASGFTFKSD | | RATLSCRASQSVSSYLA | |
| | AMHWVRQAPGKGLEWV | | WYQQKPGQAPRLLIYDA | |
| | SEISGSGGYTNYADSL | | SYRATGIPARFSGSGSG | |
| | KSRFTISRDNSKNTLY | | TDFTLTISSLEPEDFAV | |
| | LQMNSLRAEDTAVYYC | | YYCQQRRNWPLTFGQGT | |
| | ARDSYDSSLYVGDYFD | | KVEIK | |
| | YWGQGTLVTVSS | | | |

TABLE 31
Heavy Chain and Light Chain sequences of matrix
recombined PSMA hits

| | Heavy Chain | SEQ | Light Chain | SEQ |
|---|---|---|---|---|
| | Amino acid | ID | AminoAcid | ID |
| MAB ID | sequence | NO | Sequence | NO |
| PSMB358 | EVQLLESGGGLVQPGG | 13 | EIVLTQSPATLSLSPGE | 139 |
| | SLRLSCAASGFTFKSD | | RATLSCRASQSVSSYLA | |
| | AMHWVRQAPGKGLEWV | | WYQQKPGQAPRLLIYDA | |
| | SEISGSGGYTNYADSL | | SNRATGIPARFSGSGSG | |
| | KGRFTISRDNSKNTLY | | TDFTLTISSLEPEDFAV | |
| | LQMNSLRAEDTAVYYC | | YYCQQRSNWPLTFGQGT | |
| | ARDSYDSSLYVGDYFD | | KVEIKRTVAAPSVFIFP | |
| | YWGQGTLVTVSSASTK | | PSDEQLKSGTASVVCLL | |
| | GPSVFPLAPCSRSTSE | | NNFYPREAKVQWKVDNA | |
| | STAALGCLVKDYFPEP | | LQSGNSQESVTEQDSKD | |
| | VTVSWNSGALTSGVHT | | STYSLSSTLTLSKADYE | |
| | FPAVLQSSGLYSLSSV | | KHKVYACEVTHQGLSSP | |
| | VTVPSSSLGTKTYTCN | | VTKSFNRGEC | |
| | VDHKPSNTKVDKRVES | | | |
| | KYGPPCPPCPAPEAAG | | | |
| | GPSVFLFPPKPKDTLM | | | |
| | ISRTPEVTCVVVDVSQ | | | |
| | EDPEVQFNWYVDGVEV | | | |
| | HNAKTKPREEQFNSTY | | | |
| | RVVSVLTVLHQDWLNG | | | |
| | KEYKCKVSNKGLPSSI | | | |
| | EKTISKAKGQPREPQV | | | |
| | YTLPPSQEEMTKNQVS | | | |
| | LTCLVKGFYPSDIAVE | | | |
| | WESNGQPENNYKTTPP | | | |
| | VLDSDGSFFLYSRLTV | | | |
| | DKSRWQEGNVFSCSVM | | | |
| | HEALHNHYTQKSLSLS | | | |
| | LGK | | | |
| PSMB359 | EVQLLESGGGLVQPGG | 13 | EIVLTQSPATLSLSPGE | 14 |
| | SLRLSCAASGFTFKSD | | RATLSCRASQSVSNYLA | |
| | AMHWVRQAPGKGLEWV | | WYQQKPGQAPRLLIHDA | |
| | SEISGSGGYTNYADSL | | SNRATGIPARFSGSGSG | |
| | KGRFTISRDNSKNTLY | | TDFTLTISSLEPEDFAV | |
| | LQMNSLRAEDTAVYYC | | YYCQQRRNWPLTFGQGT | |
| | ARDSYDSSLYVGDYFD | | KVEIKRTVAAPSVFIFP | |
| | YWGQGTLVTVSSASTK | | PSDEQLKSGTASVVCLL | |
| | GPSVFPLAPCSRSTSE | | NNFYPREAKVQWKVDNA | |
| | STAALGCLVKDYFPEP | | LQSGNSQESVTEQDSKD | |
| | VTVSWNSGALTSGVHT | | STYSLSSTLTLSKADYE | |
| | FPAVLQSSGLYSLSSV | | KHKVYACEVTHQGLSSP | |
| | VTVPSSSLGTKTYTCN | | VTKSFNRGEC | |
| | VDHKPSNTKVDKRVES | | | |
| | KYGPPCPPCPAPEAAG | | | |
| | GPSVFLFPPKPKDTLM | | | |
| | ISRTPEVTCVVVDVSQ | | | |
| | EDPEVQFNWYVDGVEV | | | |
| | HNAKTKPREEQFNSTY | | | |
| | RVVSVLTVLHQDWLNG | | | |
| | KEYKCKVSNKGLPSSI | | | |
| | EKTISKAKGQPREPQV | | | |
| | YTLPPSQEEMTKNQVS | | | |
| | LTCLVKGFYPSDIAVE | | | |
| | WESNGQPENNYKTTPP | | | |
| | VLDSDGSFFLYSRLTV | | | |
| | DKSRWQEGNVFSCSVM | | | |
| | HEALHNHYTQKSLSLS | | | |
| | LGK | | | |
| PSMB360 | EVQLLESGGGLVQPGG | 13 | EIVLTQSPATLSLSPGE | 680 |
| | SLRLSCAASGFTFKSD | | RATLSCRASQSVSSYLA | |
| | AMHWVRQAPGKGLEWV | | WYQQKPGQAPRLLIYDA | |
| | SEISGSGGYTNYADSL | | SYRATGIPARFSGSGSG | |
| | KGRFTISRDNSKNTLY | | TDFTLTISSLEPEDFAV | |
| | LQMNSLRAEDTAVYYC | | YYCQQRRNWPLTFGQGT | |
| | ARDSYDSSLYVGDYFD | | KVEIKRTVAAPSVFIFP | |
| | YWGQGTLVTVSSASTK | | PSDEQLKSGTASVVCLL | |
| | GPSVFPLAPCSRSTSE | | NNFYPREAKVQWKVDNA | |
| | STAALGCLVKDYFPEP | | LQSGNSQESVTEQDSKD | |
| | VTVSWNSGALTSGVHT | | STYSLSSTLTLSKADYE | |
| | FPAVLQSSGLYSLSSV | | KHKVYACEVTHQGLSSP | |
| | VTVPSSSLGTKTYTCN | | VTKSFNRGEC | |
| | VDHKPSNTKVDKRVES | | | |
| | KYGPPCPPCPAPEAAG | | | |
| | GPSVFLFPPKPKDTLM | | | |
| | ISRTPEVTCVVVDVSQ | | | |
| | EDPEVQFNWYVDGVEV | | | |
| | HNAKTKPREEQFNSTY | | | |
| | RVVSVLTVLHQDWLNG | | | |
| | KEYKCKVSNKGLPSSI | | | |
| | EKTISKAKGQPREPQV | | | |
| | YTLPPSQEEMTKNQVS | | | |
| | LTCLVKGFYPSDIAVE | | | |
| | WESNGQPENNYKTTPP | | | |
| | VLDSDGSFFLYSRLTV | | | |
| | DKSRWQEGNVFSCSVM | | | |
| | HEALHNHYTQKSLSLS | | | |
| | LGK | | | |
| PSMB361 | EVQLLESGGGLVQPGG | 12 | EIVLTQSPATLSLSPGE | 15 |
| | SLRLSCAASGFTFKSD | | RATLSCRASQSVSSYLA | |
| | AMHWVRQAPGKGLEWV | | WYQQKPGQAPRLLIYDA | |
| | SEISGSGGYTNYADSM | | SNRATGIPARFSGSGSG | |
| | KSRFTISRDNSKNTLY | | TDFTLTISSLEPEDFAV | |
| | LQMNSLRAEDTAVYYC | | YYCQQRGNWPLTFGQGT | |
| | ARDSYDSSLYVGDYFD | | KVEIKRTVAAPSVFIFP | |
| | YWGQGTLVTVSSASTK | | PSDEQLKSGTASVVCLL | |
| | GPSVFPLAPCSRSTSE | | NNFYPREAKVQWKVDNA | |
| | STAALGCLVKDYFPEP | | LQSGNSQESVTEQDSKD | |
| | VTVSWNSGALTSGVHT | | STYSLSSTLTLSKADYE | |
| | FPAVLQSSGLYSLSSV | | KHKVYACEVTHQGLSSP | |
| | VTVPSSSLGTKTYTCN | | VTKSFNRGEC | |
| | VDHKPSNTKVDKRVES | | | |
| | KYGPPCPPCPAPEAAG | | | |
| | GPSVFLFPPKPKDTLM | | | |
| | ISRTPEVTCVVVDVSQ | | | |
| | EDPEVQFNWYVDGVEV | | | |
| | HNAKTKPREEQFNSTY | | | |
| | RVVSVLTVLHQDWLNG | | | |
| | KEYKCKVSNKGLPSSI | | | |
| | EKTISKAKGQPREPQV | | | |
| | YTLPPSQEEMTKNQVS | | | |
| | LTCLVKGFYPSDIAVE | | | |
| | WESNGQPENNYKTTPP | | | |
| | VLDSDGSFFLYSRLTV | | | |
| | DKSRWQEGNVFSCSVM | | | |
| | HEALHNHYTQKSLSLS | | | |
| | LGK | | | |
| PSMB362 | EVQLLESGGGLVQPGG | 12 | EIVLTQSPATLSLSPGE | 14 |
| | SLRLSCAASGFTFKSD | | RATLSCRASQSVSNYLA | |
| | AMHWVRQAPGKGLEWV | | WYQQKPGQAPRLLIHDA | |
| | SEISGSGGYTNYADSM | | SNRATGIPARFSGSGSG | |
| | KSRFTISRDNSKNTLY | | TDFTLTISSLEPEDFAV | |
| | LQMNSLRAEDTAVYYC | | YYCQQRRNWPLTFGQGT | |
| | ARDSYDSSLYVGDYFD | | KVEIKRTVAAPSVFIFP | |
| | YWGQGTLVTVSSASTK | | PSDEQLKSGTASVVCLL | |
| | GPSVFPLAPCSRSTSE | | NNFYPREAKVQWKVDNA | |
| | STAALGCLVKDYFPEP | | LQSGNSQESVTEQDSKD | |
| | VTVSWNSGALTSGVHT | | STYSLSSTLTLSKADYE | |
| | FPAVLQSSGLYSLSSV | | KHKVYACEVTHQGLSSP | |
| | VTVPSSSLGTKTYTCN | | VTKSFNRGEC | |
| | VDHKPSNTKVDKRVES | | | |
| | KYGPPCPPCPAPEAAG | | | |
| | GPSVFLFPPKPKDTLM | | | |
| | ISRTPEVTCVVVDVSQ | | | |
| | EDPEVQFNWYVDGVEV | | | |
| | HNAKTKPREEQFNSTY | | | |
| | RVVSVLTVLHQDWLNG | | | |
| | KEYKCKVSNKGLPSSI | | | |
| | EKTISKAKGQPREPQV | | | |
| | YTLPPSQEEMTKNQVS | | | |
| | LTCLVKGFYPSDIAVE | | | |
| | WESNGQPENNYKTTPP | | | |
| | VLDSDGSFFLYSRLTV | | | |
| | DKSRWQEGNVFSCSVM | | | |
| | HEALHNHYTQKSLSLS | | | |
| | LGK | | | |
| PSMB363 | EVQLLESGGGLVQPGG | 12 | EIVLTQSPATLSLSPGE | 680 |
| | SLRLSCAASGFTFKSD | | RATLSCRASQSVSSYLA | |
| | AMHWVRQAPGKGLEWV | | WYQQKPGQAPRLLIYDA | |
| | SEISGSGGYTNYADSM | | SYRATGIPARFSGSGSG | |
| | KSRFTISRDNSKNTLY | | TDFTLTISSLEPEDFAV | |
| | LQMNSLRAEDTAVYYC | | YYCQQRRNWPLTFGQGT | |
| | ARDSYDSSLYVGDYFD | | KVEIKRTVAAPSVFIFP | |
| | YWGQGTLVTVSSASTK | | PSDEQLKSGTASVVCLL | |
| | GPSVFPLAPCSRSTSE | | NNFYPREAKVQWKVDNA | |
| | STAALGCLVKDYFPEP | | LQSGNSQESVTEQDSKD | |
| | VTVSWNSGALTSGVHT | | STYSLSSTLTLSKADYE | |
| | FPAVLQSSGLYSLSSV | | KHKVYACEVTHQGLSSP | |
| | VTVPSSSLGTKTYTCN | | VTKSFNRGEC | |
| | VDHKPSNTKVDKRVES | | | |
| | KYGPPCPPCPAPEAAG | | | |
| | GPSVFLFPPKPKDTLM | | | |
| | ISRTPEVTCVVVDVSQ | | | |
| | EDPEVQFNWYVDGVEV | | | |
| | HNAKTKPREEQFNSTY | | | |
| | RVVSVLTVLHQDWLNG | | | |
| | KEYKCKVSNKGLPSSI | | | |
| | EKTISKAKGQPREPQV | | | |
| | YTLPPSQEEMTKNQVS | | | |
| | LTCLVKGFYPSDIAVE | | | |
| | WESNGQPENNYKTTPP | | | |
| | VLDSDGSFFLYSRLTV | | | |
| | DKSRWQEGNVFSCSVM | | | |
| | HEALHNHYTQKSLSLS | | | |
| | LGK | | | |
| PSMB365 | EVQLLESGGGLVQPGG | 679 | EIVLTQSPATLSLSPGE | 631 |
| | SLRLSCAASGFTFKSD | | RATLSCRASQSVSSYLA | |
| | AMHWVRQAPGKGLEWV | | WYQQKPGQAPRLLIYDA | |
| | SEISGSGGYTNYADSL | | SYRATGIPARFSGSGSG | |
| | KSRFTISRDNSKNTLY | | TDFTLTISSLEPEDFAV | |
| | LQMNSLRAEDTAVYYC | | YYCQQRRNWPLTFGQGT | |
| | ARDSYDSSLYVGDYFD | | KVEIKRTVAAPSVFIFP | |
| | YWGQGTLVTVSSASTK | | PSDEQLKSGTASVVCLL | |
| | GPSVFPLAPCSRSTSE | | NNFYPREAKVQWKVDNA | |
| | STAALGCLVKDYFPEP | | LQSGNSQESVTEQDSKD | |
| | VTVSWNSGALTSGVHT | | STYSLSSTLTLSKADYE | |
| | FPAVLQSSGLYSLSSV | | KHKVYACEVTHQGLSSP | |
| | VTVPSSSLGTKTYTCN | | VTKSFNRGEC | |
| | VDHKPSNTKVDKRVES | | | |
| | KYGPPCPPCPAPEAAG | | | |
| | GPSVFLFPPKPKDTLM | | | |
| | ISRTPEVTCVVVDVSQ | | | |
| | EDPEVQFNWYVDGVEV | | | |
| | HNAKTKPREEQFNSTY | | | |
| | RVVSVLTVLHQDWLNG | | | |
| | KEYKCKVSNKGLPSSI | | | |
| | EKTISKAKGQPREPQV | | | |
| | YTLPPSQEEMTKNQVS | | | |
| | LTCLVKGFYPSDIAVE | | | |
| | WESNGQPENNYKTTPP | | | |
| | VLDSDGSFFLYSRLTV | | | |
| | DKSRWQEGNVFSCSVM | | | |
| | HEALHNHYTQKSLSLS | | | |
| | LGK | | | |

Table 32 shows the CDR sequences for all affinity-matured PSMA hits.

TABLE 32
CDR sequences of affinity-matured PSMA hits

| | | CDRs (SEQ ID NO:) | | |
|---|---|---|---|---|
| MAB ID | | CDR1 | CDR2 | CDR3 |
| PSMB344 | HC | SDAMH | EISGSGGYT | DSYDSSLYV |
| | | (78) | NYADSMKG | GDYFDY |
| | | | (1) | (80) |
| | LC | RASQSVSSYLA | DASNRAT | QQRSNWPLT |
| | | (81) | (82) | (83) |
| PSMB345 | HC | SDAMH | EISGSGGYT | DSYDSSLYV |
| | | (78) | NYADSMKG | GDYFDY |
| | | | (1) | (80) |
| | LC | RASQSVSNYLA | DASNRAT | QQRRNWPLT |
| | | (4) | (82) | (686) |
| PSMB346 | HC | SDAMH | EISGSGGYT | DSYDSSLYV |
| | | (78) | NYADSMKG | GDYFDY |
| | | | (1) | (80) |
| | LC | RASQSVSSYLA | DASYRAT | QQRRNWPLT |
| | | (81) | (684) | (686) |
| PSMB347 | HC | SDAMH | EISGSGGYT | DSYDSSLYV |
| | | (78) | NYADSMKS | GDYFDY |
| | | | (2) | (80) |
| | LC | RASQSVSSYLA | DASNRAT | QQRSNWPLT |
| | | (81) | (82) | (83) |
| PSMB349 | HC | SDAMH | EISGSGGYT | DSYDSSLYV |
| | | (78) | NYADSLKG | GDYFDY |
| | | | (3) | (80) |
| | LC | RASQSVSSYLA | DASNRAT | QQRGNWPLT |
| | | (81) | (82) | (5) |
| PSMB358 | HC | SDAMH | EISGSGGYT | DSYDSSLYV |
| | | (78) | NYADSLKG | GDYFDY |
| | | | (3) | (80) |
| | LC | RASQSVSSYLA | DASNRAT | QQRSNWPLT |
| | | (81) | (82) | (83) |
| PSMB359 | HC | SDAMH | EISGSGGYT | DSYDSSLYV |
| | | (78) | NYADSLKG | GDYFDY |
| | | | (3) | (80) |
| | LC | RASQSVSNYLA | DASNRAT | QQRRNWPLT |
| | | (4) | (82) | (686) |
| PSMB360 | HC | SDAMH | EISGSGGYT | DSYDSSLYV |
| | | (78) | NYADSLKG | GDYFDY |
| | | | (3) | (80) |
| | LC | RASQSVSSYLA | DASYRAT | QQRRNWPLT |
| | | (81) | (684) | (686) |
| PSMB361 | HC | SDAMH | EISGSGGYT | DSYDSSLYV |
| | | (78) | NYADSMKS | GDYFDY |
| | | | (2) | (632) |
| | LC | RASQSVSSYLA | DASNRAT | QQRGNWPLT |
| | | (81) | (82) | (5) |
| PSMB362 | HC | SDAMH | EISGSGGYT | DSYDSSLYV |
| | | (78) | NYADSMKS | GDYFDY |
| | | | (2) | (80) |
| | LC | RASQSVSNYLA | DASNRAT | QQRRNWPLT |
| | | (4) | (685) | (686) |
| PSMB363 | HC | SDAMH | EISGSGGYT | DSYDSSLYV |
| | | (78) | NYADSMKS | GDYFDY |
| | | | (2) | (80) |
| | LC | RASQSVSSYLA | DASYRAT | QQRRNWPLT |
| | | (630) | (684) | (686) |
| PSMB365 | HC | SDAMH | EISGSGGYT | DSYDSSLYV |
| | | (78) | NYADSLKS | GDYFDY |
| | | | (683) | (80) |
| | LC | RASQSVSSYLA | DASYRAT | QQRRNWPLT |
| | | (81) | (684) | (686) |

[0727] 3 Preparation and Functional Evaluation of PSMA×CD3 Bispecific Antibodies

[0728] 3-1 Generation of PSMA×CD3 Bispecific Antibodies

[0729] Two types of affinity-matured PSMA×CD3 bispecific antibodies were generated: one specific for the targeting arm (e.g. affinity matured anti-PSMA) recombined with a high affinity CD3 arm CD3B376 (VH SEQ ID NO:652, VL SEQ ID NO:661; HC SEQ ID NO:640, LC SEQ ID NO:676) CD3 arm or low affinity CD3B450 (VH SEQ ID NO: 657, VL SEQ ID NO: 678, HC SEQ ID NO:675, LC SEQ ID NO:677) arm.

[0730] These parental mAbs are in the GenMab format (Labrijn et al, 2013) where the targeting parent (PSMA) contains the 409R GenMab mutation (native amino acid for IgG4), while the killing parent (CD3) contains the F405L GenMab mutation and R409K mutation. The monospecific anti-CD3 antibody was expressed as IgG4, having Fc substitutions S228P, F234A, L235A, F405L, and R409K (CD3 arm) (numbering according to EU index) in their Fc regions. The targeting parent (PSMA) is on human IgG4 with Fc substitutions S228P, F234A, L235A. The monospecific antibodies were expressed in HEK cell lines under CMV promoters.

[0731] The parental PSMA and CD3 antibodies were purified using a protein A column with an elution buffer of 100 mM NaAc pH3.5 and a neutralization buffer of 2.5M Tris, pH 7.2. The neutralized parental mAbs were used to make PSMA×CD3 bispecific antibodies. A portion of parental mabs were further buffer exchanged into D-PBS, pH 7.2 buffer for analytical measurements and assays.

[0732] Post purification, controlled Fab-arm exchange was performed to make bispecific antibodies. The parental PSMA antibodies were mixed with the desired parental CD3 antibody under reducing conditions in 75 mM-2-MEA (2-Mercaptoethylamine) and incubated at 31° C. for 4 h or at room temperature overnight. The recombination reactions were based on molar ratios, where 6% excess PSMA parental mAbs was used to minimize the CD3 parental mAb remaining after recombination. The recombinations were subsequently dialyzed against 1×DPBS, pH 7.2 to remove the reductant.

[0733] The final bispecific antibodies produced, along with the parental mAbs (i.e. PSMA, CD3, or Null) used in the recombination reactions are listed in Table 33. Selected PSMA hits were also paired with a non-killing arm (Null) to create negative controls for testing purposes. For control bispecific antibodies, B2M1, an RSV antibody in the IgG4 PAA format (VH SEQ ID NO:610, VL SEQ ID NO:611) was generated, purified and, combined with either the CD3 arm CD3B219-F405L, R409K to generate CD3B288 (CD3×null) or PSMA arms, PSMB122, PSMB126, PSMB130 to generate PS3B37, PS3B39 and PS3B40 respectively (PSMA×null). These PSMA specific affinity matured Mabs were crossed (as in methods above) to CD3B219 and CD3B376 to generate the bispecific antibodies shown in Table 32.

TABLE 33
Generation of affinity-matured PSMA × CD3 bispecific
antibodies generated from affinity matured PSMA hits

| ID | Arm 1 | HC | LC | Arm 2 | HC | LC |
|---|---|---|---|---|---|---|
| PS3B60 | PSMB344 | PSMH859 | PH9L3 | CD3B219 | CD3H141 | CD3L66 |
| PS3B61 | PSMB345 | PSMH859 | PSML159 | CD3B219 | CD3H141 | CD3L66 |
| PS3B62 | PSMB346 | PSMH859 | PSML160 | CD3B219 | CD3H141 | CD3L66 |
| PS3B63 | PSMB347 | PSMH860 | PH9L3 | CD3B219 | CD3H141 | CD3L66 |
| PS3B64 | PSMB349 | PSMH862 | PSML158 | CD3B219 | CD3H141 | CD3L66 |
| PS3B70 | PSMB358 | PSMH862 | PH9L3 | CD3B219 | CD3H141 | CD3L66 |
| PS3B71 | PSMB359 | PSMH862 | PSML159 | CD3B219 | CD3H141 | CD3L66 |
| PS3B72 | PSMB360 | PSMH862 | PSML160 | CD3B219 | CD3H141 | CD3L66 |
| PS3B73 | PSMB361 | PSMH860 | PSML158 | CD3B219 | CD3H141 | CD3L66 |
| PS3B74 | PSMB362 | PSMH860 | PSML159 | CD3B219 | CD3H141 | CD3L66 |
| PS3B75 | PSMB363 | PSMH860 | PSML160 | CD3B219 | CD3H141 | CD3L66 |
| PS3B76 | PSMB358 | PSMH862 | PH9L3 | CD3B376 | CD3H219 | CD3L150 |
| PS3B77 | PSMB349 | PSMH862 | PSML158 | CD3B376 | CD3H219 | CD3L150 |
| PS3B78 | PSMB359 | PSMH862 | PSML159 | CD3B376 | CD3H219 | CD3L150 |
| PS3B79 | PSMB360 | PSMH862 | PSML160 | CD3B376 | CD3H219 | CD3L150 |
| PS3B80 | PSMB347 | PSMH860 | PH9L3 | CD3B376 | CD3H219 | CD3L150 |
| PS3B81 | PSMB361 | PSMH860 | PSML158 | CD3B376 | CD3H219 | CD3L150 |
| PS3B82 | PSMB362 | PSMH860 | PSML159 | CD3B376 | CD3H219 | CD3L150 |
| PS3B83 | PSMB363 | PSMH860 | PSML160 | CD3B376 | CD3H219 | CD3L150 |
| PS3B84 | PSMB344 | PSMH859 | PH9L3 | CD3B376 | CD3H219 | CD3L150 |
| PS3B85 | PSMB345 | PSMH859 | PSML159 | CD3B376 | CD3H219 | CD3L150 |
| PS3B86 | PSMB346 | PSMH859 | PSML160 | CD3B376 | CD3H219 | CD3L150 |
| PS3B90 | PSMB365 | PSMH865 | PSML160 | CD3B376 | CD3H219 | CD3L150 |

[0734] 3-2 Evaluation of PSMA×CD3 Affinity Matured Bispecific Abs in LNCAP Cell Binding

[0735] PSMA×CD3 bispecific antibodies were tested for binding to PSMA positive cell line, LNCAP, to PSMA negative cell line, PC3. To assess the binding capabilities of the PSMA bispecific antibodies, the cell-binding assay was utilized (described previously). Bispecific antibodies were normalized for protein concentration and then incubated with the same number of cells expressing either human or cyno PSMA. The MFI at each concentration was collected by flow cytometry and plotted as a function of concentration. Data was transformed via log 10 and then plotted. Nonlinear regression of binding curves was done to determine EC50s.

[0736] These relative values were used for ranking PSMA binding to target cells. FIGS. 14-16 show LNCAP binding of all bispecific antibodies prepared. In FIG. 16, none of the constructs demonstrated binding to the PSMA negative cell line. In FIG. 14 and FIG. 15, all of the affinity matured hits demonstrated increased binding affinity through left shifted curves and increased cMax as compared to the parental Mab, PS2B27.

[0737] The interactions of the affinity matured bispecific antibodies with recombinant Cyno PSMA ECD and Human PSMA ECD were studied by Surface Plasmon Resonance (SPR) using a ProteOn XPR36 system (BioRad) as described previously for recombinant chimp PSMA ECD. All of the bispecific antibodies bind both targets with substantially the same affinity, KDs ranging from 0.05 nM to 0.27 nM for human PSMA ECD and from 0.05 nM to 0.23 nM from cyno PSMA ECD.

[0738] 3-3 Evaluation of PSMA×CD3 Affinity Matured Bispecific Abs in Functional Cell Killing Assay

[0739] Based on the above data, affinity measurements, and sequence identity, three PSMA antibodies, PSMB347, PSMB360 and PSMB365 as bispecifics with either CD3B219 or CD3B376, were further characterized for the ability to mediate PSMA specific, redirected T cell cytotoxicity. T-cell mediated killing was measured using a caspase cytotoxicity assay, which indirectly measures cell killing via cleavage of a fluorescent substrate by active caspase 3/7. Cleavage of the substrate results in a fluorescent DNA dye, with fluorescence restricted to the cell nucleus. Repeated fluorescence measurements are taken in each well throughout the course of the assay, using a motorized 10× objective, capable of precisely imaging well(s) at the same coordinates. Target cell populations are identified based on defined size restrictions and/or through the use of a secondary label. Frozen Pan CD3+ T-cells (purchased from Biological Specialty Corporation, Colmar, Pa.) were isolated by negative selection from normal healthy donors. Prostate cancer cells, expressing PSMA, (LNCaP, C42) were cultured in RPMI 1640 with 10% HI FBS+supplements (purchased from Life Technologies).

[0740] T-cells and target cells were combined at an effector to target ratio (E:T) of 3:1 in Phenol Red free RPMI+10% FBS and supplements (Life Technologies), without selection reagents, and 0.6 uL of NucView caspase reagent (Essen Bioscience) was added to each mL of cells, per manufacturer guidelines. A total volume of 0.1 mL cells were added to appropriate wells of a clear, 96-well flat-bottom plate (BD Falcon). PS3B27 (CD3×PSMA), CD3B288 (CD3×Null) or PS3B46 (PSMA×Null) Bispecific antibodies were prepared at 2× final concentration in Phenol Red free RPMI, prepared as indicated above, and 0.1 mL of compounds were added to each well. After 30 minute incubation at room temperature to minimize cell aggregation at the edge of wells, plates were transferred to the Zoom Incucyte instrument (Essen Bioscience). The Incucyte Instrument resides in a humidified incubator set at 37° C., 5% CO2.

[0741] Processing definitions on the Incucyte were designed for each cell line tested, per manufacture guidelines. Measurements were taken every six hours, until a plateau in the caspase signal was observed, and followed by three or more successive decreases from the maximum signal in the well(s) containing the highest concentration of the test compound(s). As the data shows in FIG. 17, the curves for PS3B80, PS3B79, PS3B89, PS3B90, PS3B63, and PS3B72 are left shifted indicating increased potency over PS3B27. The null arm controls did not induce cell death as expected.

[0742] 3-4 Anti-Tumor Efficacy in Tumorigenesis Prevention of LnCaP Xenografts in Humanized NSG Mice

[0743] Efficacy of PS3B79 and PS3B90 was evaluated in established 3D LnCaP AR.TB human prostate cancer xenografts in male NOD.Cg-Prkdc^{scid} Il2rg^{tm1Wjl}/SzJ (NSG) mice humanized intraperitoneally (ip) with human T cells. PS3B79 and PS3B90 at 2.5 and 5 mg/kg or Null×CD3B376 antibody control was dosed q3d-q4d on Days 36, 39, 43, 47, 50, 53, 56, 60, and 63 for a total of 8 doses. On day 53 post-tumor implant, which was the last date of the study when nine (9) animals remained per group, tumor growth inhibition (% TGI) was calculated. Statistically significant tumor growth inhibition was observed for PS3B79 at 5 mg/kg with 42% TGI (Two-way ANOVA with Bonferroni test, *p<0.0001, FIG. 20), and for PS3B90 at 2.5 and 5 mg/kg with 53% and 33% respectively compared to Null×CD3 control (Two-way ANOVA with Bonferroni test, *p<0.001, FIG. 21). Thus, CD3B376 is able to induce T cell activation and cytotoxicity in vivo and result in tumor growth inhibition in a bispecific format with high affinity PSMA binding arms, PSMB360 and PSMB365.

[0744] 4 Preparation and Functional Evaluation of IL1RAP×CD3 Bispecific Antibodies

[0745] IL1RAP monoclonal antibodies used in and suitable for use in the bispecific antibodies of the present disclosure are described in U.S. Patent Application Publication No. 20170121420A1, the disclosure of which is hereby incorporated by reference in its entirety. Fifteen monospecific IL1RAP antibodies (see Table 6 of US20170121420A1) were expressed as IgG4, having Fc substitutions S228P, L234A, and L235A. CD3 parental mAbs were expressed as IgG4 with S228P, L234A, L235A, F405L, and R409K (numbering according to EU index). A monospecific anti-CD3 antibody CD3B220 was also generated comprising the VH and VL regions having the VH of SEQ ID NO: 92 and the VL of SEQ ID NO: 93 and IgG4 constant region with S228P, L234A, L235A, F405L, and R409K substitutions.

[0746] The monospecific antibodies were purified using standard methods using a Protein A column. After elution, the pools were neutralized to pH 7 and dialyzed into 1×D-PBS, pH 7.2.

[0747] Bispecific IL1RAP×CD3 antibodies were generated by combining a monospecific CD3 mAb (CD3B376: VH of SEQ ID NO: 652 and VL of SEQ ID NO: 661; or CD3B450: VH of SEQ ID NO: 657 and VL of SEQ ID NO: 678) and a monospecific IL1RAP mAb through controlled Fab-arm exchange (as described in WO2011/131746). Briefly, at about 1-20 mg/mL at a molar ratio of 1.08:1 of anti-IL1RAP/anti-CD3 antibody in DPBS, pH 7-7.4 and 75 mM 2-mercaptoethanolamine (2-MEA) were mixed together and incubated at 25-37° C. for 2-6 hours, followed by removal of the 2-MEA via dialysis, diafiltration, tangential flow filtration to remove the reductant and enable bispecific antibody formation.

[0748] Heavy and light chains for the IL1RAP×CD3 bispecific antibodies are shown below in Table 34.

TABLE 34
CDR sequences of 15 IL1RAP mAbs selected for
generation of IL1RAP × CD3 bispecific
antibodies (SEQ ID NOs in parentheses).

| | | | | LC- | LC- | LC- |
|---|---|---|---|---|---|---|
| ID | HC-CDR1 | HC-CDR2 | HC-CDR3 | CDR1 | CDR2 | CDR3 |
| IAPB47 | GYSFTSYW | IYPSDSYT | ARRNSAE | QSISND | YAS | QQSFT |
| | (152) | (153) | NYADLDY | (155) | (156) | APLT |
| | | | (154) | | | (157) |
| IAPB38 | GFTFSNYA | INYGGGSK | AKDYGPF | QSVDDW | TAS | QQYHH |
| | (158) | (159) | ALDY | (161) | (162) | WPLT |
| | | | (160) | | | (163) |
| IAPB57 | GGSISSST | IYFTGST | AKEDDSS | QGISSY | AAS | QQVNS |
| | YY | (165) | GYYSFDY | (167) | (168) | YPLT |
| | (164) | | (169) | | | (166) |
| IAPB61 | GVSISSST | IYFTGNT | GSLFGDY | QFISSN | GAS | QQYNN |
| | YY | (171) | GYFDY | (173) | (174) | WPST |
| | (170) | | (172) | | | (175) |
| IAPB62 | GYTFNTYA | INTNTGNP | ARRYFDW | QGISSW | AAS | QQANS |
| | (176) | (177) | LLGAFDI | (179) | (168) | FPLT |
| | | | (178) | | | (180) |
| IAPB3 | GGTFSSYA | ISAIFGTA | ARGNSFH | QSVLYSS | WAS | QQYYS |
| | (181) | (182) | ALWDYAF | NNKNY | (185) | TPLT |
| | | | DY | (184) | | (186) |
| | | | (183) | | | |
| IAPB17 | GGTFSSYA | IIPIFGNA | ARTIIYL | QSVLYSS | WAS | QQYYS |
| | (181) | (187) | DYVHILD | NNKNY | (185) | TPLT |
| | | | Y | (184) | | (186) |
| | | | (188) | | | |
| IAPB23 | GFTFSNYW | IRYDGGSK | AKDAYPP | QSVSSY | DAS | QQRSN |
| | (189) | (190) | YSFDY | (192) | (193) | WPLT |
| | | | (191) | | | (194) |
| IAPB25 | GFTFSSYA | ISGSGGST | AKGDEYY | QSISSY | AAS | QQSYS |
| | (195) | (196) | YPDPLDY | (198) | (168) | TPLT |
| | | | (197) | | | (199) |
| IAPB29 | GFTFSNYA | ISGSGGST | AKEWSSY | QSISSY | AAS | QQSYS |
| | (158) | (196) | FGLDY | (198) | (168) | TPLT |
| | | | (200) | | | (199) |
| IAPB9 | GGTFSSYA | ISPIFGTA | ARRYDNF | QSISSY | AAS | QQSYS |
| | (181) | (201) | ARSGDLD | (198) | (168) | TPLT |
| | | | Y | | | (199) |
| | | | (202) | | | |
| IAPB55 | GVSISSST | IYFTGNT | GSLFGDY | QFISSN | GAS | QQYNN |
| | YY | (171) | GYFDY | (173) | (174) | WPFT |
| | (170) | | (172) | | | (203) |
| IAPB63 | GYTFNTYA | INTNTGNP | ARRYFDW | SSDVGDY | DVS | ASYAG |
| | (176) | (177) | LLGAFDI | NY | (205) | NYNVV |
| | | | (178) | (204) | | (206) |
| IAPB64 | GYTFNTYA | INTNTGNP | ARRYFDW | SSDVGDY | DVS | SSYAG |
| | (176) | (177) | LLGAFDI | NY | (205) | NYNVV |
| | | | (178) | (204) | | (207) |
| IAPB65 | GGTFSSYA | ISAIFGTA | ARHLHNA | QSVSNF | GAS | QQGKH |
| | (181) | (182) | IHLDY | (209) | (174) | WPWT |
| | | | (208) | | | (210) |

[0749] VH and VL sequences of the 15 IL1RAP mAbs are shown below in Table 35.

TABLE 35
VH and VL sequences of IL1RAP mAbs for
generation of IL1RAP × CD3 bispecific
antibodies.

| | | SEQ | VL Amino | SEQ |
|---|---|---|---|---|
| | VH Amino | ID | Acid | ID |
| ID | Acid Sequence | NO: | Sequence | NO. |
| IAPB47 | EVQLVQSGAEVKKPGESLK | 211 | EIVLTQSPGTLSL | 212 |
| | ISCKGSGYSFTSYWIGWVR | | SPGERATLSCRAS | |
| | QMPGKGLEWMGIIYPSDSY | | QSISNDLNWYQQK | |
| | TRYSPSFQGQVTISADKSI | | PGKAPKLLIYYAS | |
| | STAYLQWSSLKASDTAMYY | | SLQSGVPSRFSGS | |
| | CARRNSAENYADLDYWGQG | | GSGTDFTLTINSL | |
| | TLVTVSSASTKGPSVFPLA | | QPEDFATYYCQQS | |
| | PCSRSTSESTAALGCLVKD | | FTAPLTFGQGTKV | |
| | YFPEPVTVSWNSGALTSGV | | EIKRTVAAPSVFI | |
| | HTFPAVLQSSGLYSLSSVV | | FPPSDEQLKSGTA | |
| | TVPSSSLGTKTYTCNVDHK | | SVVCLLNNFYPRE | |
| | PSNTKVDKRVESKYGPPCP | | AKVQWKVDNALQS | |
| | PCPAPEAAGGPSVFLFPPK | | GNSQESVTEQDSK | |
| | PKDTLMISRTPEVTCVVVD | | DSTYSLSSTLTLS | |
| | VSQEDPEVQFNWYVDGVEV | | KADYEKHKVYACE | |
| | HNATKPREEQFNSTYRVVK | | VTHQGLSSPVTKS | |
| | SVLTVLHQDWLNGKEYKCK | | FNRGEC | |
| | VSNKGLPSSIEKTISKAKG | | | |
| | QPREPQVYTLPPSQEEMTK | | | |
| | NQVSLTCLVKGFYPSDIAV | | | |
| | EWESNGQPENNYKTTPPVL | | | |
| | DSDGSFFLYSRLTVDKSRW | | | |
| | QEGNVFSCSVMHEALHNHY | | | |
| | TQKSLSLSLGK | | | |
| IAPB38 | EVQLLESGGGLVQPGGSLR | 213 | EIVLTQSPATLSL | 214 |
| | LSCAASGFTFSNYAMNWV | | SPGERATLSCRAS | |
| | RQAPGKGLEWVSGINYGG | | QSVDDWLAWYQQK | |
| | GSKYYADSVKGRFTISRDN | | PGQAPRLLIYTAS | |
| | SKNTLYLQMNSLRAEDTAV | | NRATGIPARFSGS | |
| | YYCAKDYGPFALDYWGQG | | GSGTDFTLTISSL | |
| | TLVTVSSASTKGPSVFPLA | | EPEDFAVYYCQQY | |
| | PCSRSTSESTAALGCLVKD | | HHWPLTFGQGTKV | |
| | YFPEPVTVSWNSGALTSGV | | EIKRTVAAPSVFI | |
| | HTFPAVLQSSGLYSLSSVV | | FPPSDEQLKSGTA | |
| | TVPSSSLGTKTYTCNVDHK | | SVVCLLNNFYPRE | |
| | PSNTKVDKRVESKYGPPCP | | AKVQWKVDNALQS | |
| | PCPAPEAAGGPSVFLFPPK | | GNSQESVTEQDSK | |
| | PKDTLMISRTPEVTCVVVD | | DSTYSLSSTLTLS | |
| | VSQEDPEVQFNWYVDGVEV | | KADYEKHKVYACE | |
| | HNAKTKPREEQFNSTYRVV | | VTHQGLSSPVTKS | |
| | SVLTVLHQDWLNGKEYKCK | | FNRGEC | |
| | VSNKGLPSSIEKTISKAKG | | | |
| | QPREPQVYTLPPSQEEMTK | | | |
| | NQVSLTCLVKGFYPSDIAV | | | |
| | EWESNGQPENNYKTTPPVL | | | |
| | DSDGSFFLYSRLTVDKSRW | | | |
| | QEGNVFSCSVMHEALHNHY | | | |
| | TQKSLSLSLGK | | | |
| IAPB57 | QLQLQESGPGLVKPSETLS | 215 | DIQLTQSPSFLSA | 216 |
| | LTCTVSGGSISSSTYYWGW | | SVGDRVTITCRAS | |
| | IRQPPGKGLEWIGSIYFTG | | QGISSYLAWYQQK | |
| | STDYNPSLKSRVSISVDTS | | PGKAPKLLIYAAS | |
| | KNQFSLKLSSVTAADTAVY | | TLQSGVPSRFSGS | |
| | YCAKEDDSSGYYSFDYWGQ | | GSGTEFTLTISSL | |
| | GNLVTVSSASTKGPSVFPL | | QPEDFATYYCQQV | |
| | APCSRSTSESTAALGCLVK | | NSYPLTFGGGTKV | |
| | DYFPEPVTVSWNSGALTSG | | EIKRTVAAPSVFI | |
| | VHTFPAVLQSSGLYSLSSV | | FPPSDEQLKSGTA | |
| | VTVPSSSLGTKTYTCNVDH | | SVVCLLNNFYPRE | |
| | KPSNTKVDKRVESKYGPPC | | AKVQWKVDNALQS | |
| | PPCPAPEAAGGPSVFLFPP | | GNSQESVTEQDSK | |
| | KPKDTLMISRTPEVTCVVV | | DSTYSLSSTLTLS | |
| | DVSQEDPEVQFNWYVDGVE | | KADYEKHKVYACE | |
| | VHNAKTKPREEQFNSTYRV | | VTHQGLSSPVTKS | |
| | VSVLTVLHQDWLNGKEYKC | | FNRGEC | |
| | KVSNKGLPSSIEKTISKAK | | | |
| | GQPREPQVYTLPPSQEEMT | | | |
| | KNQVSLTCLVKGFYPSDIA | | | |
| | VEWESNGQPENNYKTTPPV | | | |
| | LDSDGSFFLYSRLTVDKSR | | | |
| | WQEGNVFSCSVMHEALHNH | | | |
| | YTQKSLSLSLGK | | | |
| IAPB61 | QLQLQESGPGLVKPSETLS | 217 | EIVMTQSPATLSV | 218 |
| | LTCTVSGVSISSSTYYWGW | | PPGERATLSCRAS | |
| | LRQPPGMGLEWTGSIYFTG | | QFISSNLAWYQQK | |
| | NTYYNPSLKSRVTISVDTS | | PGQAPRLLIYGAS | |
| | RNQFSLKLSSVTAADTAVY | | TRATGIPARFSGS | |
| | YCGSLFGDYGYFDYWGQGT | | GSGTDFTLTISSL | |
| | LVTVSSASTKGPSVFPLAP | | QSEDFAVYYCQQY | |
| | CSRSTSESTAALGCLVKDY | | NNWPSTFGPGTKV | |
| | FPEPVTVSWNSGALTSGVH | | DIKRTVAAPSVFI | |
| | TFPAVLQSSGLYSLSSVVT | | FPPSDEQLKSGTA | |
| | VPSSSLGTKTYTCNVDHKP | | SVVCLLNNFYPRE | |
| | SNTKVDKRVESKYGPPCPP | | AKVQWKVDNALQS | |
| | CPAPEAAGGPSVFLFPPKP | | GNSQESVTEQDSK | |
| | KDTLMISRTPEVTCVVVDV | | DSTYSLSSTLTLS | |
| | SQEDPEVQFNWYVDGVEVH | | KADYEKHKVYACE | |
| | NAKTKPREEQFNSTYRVVS | | VTHQGLSSPVTKS | |
| | VLTVLHQDWLNGKEYKCKV | | FNRGEC | |
| | SNKGLPSSIEKTISKAKGQ | | | |
| | PREPQVYTLPPSQEEMTKN | | | |
| | QVSLTCLVKGFYPSDIAVE | | | |
| | VVESNGQPENNYKTTPPVL | | | |
| | DSDGSFFLYSRLTVDKSRW | | | |
| | QEGNVFSCSVMHEALHNHY | | | |
| | TQKSLSLSLGK | | | |
| IAPB62 | QVQLVQSGSELKKPGASVK | 219 | DIQMTQSPSSVSA | 220 |
| | VSCKASGYTFNTYAMNWV | | SVGDRVTITCRAS | |
| | RQAPGQGLEWMGWINTNT | | QGISSWLAWYQQK | |
| | GNPTYAQGFTGRFVFSLDT | | PGKAPKLLIYAAS | |
| | SVSTAYLQISSLKAEDTAV | | SLQSGVPSRFSGS | |
| | YYCARRYFDWLLGAFDIWG | | GSGTDFTLTISSL | |
| | QGTMVTVSSASTKGPSVFP | | QPEDFATYYCQQA | |
| | LAPCSRSTSESTAALGCLV | | NSFPLTFGGGTKV | |
| | KDYFPEPVTVSWNSGALTS | | EIKRTVAAPSVFI | |
| | GVHTFPAVLQSSGLYSLSS | | FPPSDEQLKSGTA | |
| | VVTVPSSSLGTKTYTCNVD | | SVVCLLNNFYPRE | |
| | HKPSNTKVDKRVESKYGPP | | AKVQWKVDNALQS | |
| | CPPCPAPEAAGGPSVFLFP | | GNSQESVTEQDSK | |
| | PKPKDTLMISRTPEVTCVV | | DSTYSLSSTLTLS | |
| | VDVSQEDPEVQFNWYVDGV | | KADYEKHKVYACE | |
| | EVHNAKTKPREEQFNSTYR | | VTHQGLSSPVTKS | |
| | VVSVLTVLHQDWLNGKEYK | | FNRGEC | |
| | CKVSNKGLPSSIEKTISKA | | | |
| | KGQPREPQVYTLPPSQEEM | | | |
| | TKNQVSLTCLVKGFYPSDI | | | |
| | AVEWESNGQPENNYKTTPP | | | |
| | VLDSDGSFFLYSRLTVDKS | | | |
| | RWQEGNVFSCSVMHEALHN | | | |
| | HYTQKSLSLSLGK | | | |
| IAPB3 | QVQLVQSGAEVKKPGSSVK | 221 | DIVMTQSPDSLAV | 222 |
| | VSCKASGGTFSSYAISWVR | | SLGERATINCKSS | |
| | QAPGQGLEWMGGISAIFGT | | QSVLYSSNNKNYL | |
| | ANYAQKFQGRVTITADEST | | AWYQQKPGQPPKL | |
| | STAYMELSSLRSEDTAVYY | | LIYWASTRESGVP | |
| | CARGNSFHALWDYAFDYW | | DRFSGSGSGTDFT | |
| | GQGTLVTVSSASTKGPSVF | | LTISSLQAEDVAV | |
| | PLAPCSRSTSESTAALGCL | | YYCQQYYSTPLTF | |
| | VKDYFPEPVTVSWNSGALT | | GQGTKVEIKRTVA | |
| | SGVHTFPAVLQSSGLYSLS | | APSVFIFPPSDEQ | |
| | SVVTVPSSSLGTKTYTCNV | | LKSGTASVVCLLN | |
| | DHKPSNTKVDKRVESKYGP | | NFYPREAKVQWKV | |
| | PCPPCPAPEAAGGPSVFLF | | DNALQSGNSQESV | |
| | PPKPKDTLMISRTPEVTCV | | TEQDSKDSTYSLS | |
| | VVDVSQEDPEVQFNWYVDG | | STLTLSKADYEKH | |
| | VEVHNAKTKPREEQFNSTY | | KVYACEVTHQGLS | |
| | RVVSVLTVLHQDWLNGKEY | | SPVTKSFNRGEC | |
| | KCKVSNKGLPSSIEKTISK | | | |
| | AKGQPREPQVYTLPPSQEE | | | |
| | MTKNQVSLTCLVKGFYPSD | | | |
| | IAVEWESNGQPENNYKTTP | | | |
| | PVLDSDGSFFLYSRLTVDK | | | |
| | SRWQEGNVFSCSVMHEALH | | | |
| | NHYTQKSLSLSLGK | | | |
| IAPB17 | QVQLVQSGAEVKKPGSSVK | 223 | DIVMTQSPDSLAV | 222 |
| | VSCKASGGTFSSYAISWVR | | SLGERATINCKSS | |
| | QAPGQGLEWMGGIIPIFGN | | QSVLYSSNNKNYL | |
| | ANYAQKFQGRVTITADEST | | AWYQQKPGQPPKL | |
| | STAYMELSSLRSEDTAVYY | | LIYWASTRESGVP | |
| | CARTIIYLDYVHILDYWGQ | | DRFSGSGSGTDFT | |
| | GTLVTVSSASTKGPSVFPL | | LTISSLQAEDVAV | |
| | APCSRSTSESTAALGCLVK | | YYCQQYYSTPLTF | |
| | DYFPEPVTVSWNSGALTSG | | GQGTKVEIKRTVA | |
| | VHTFPAVLQSSGLYSLSSV | | APSVFIFPPSDEQ | |
| | VTVPSSSLGTKTYTCNVDH | | LKSGTASVVCLLN | |
| | KPSNTKVDKRVESKYGPPC | | NFYPREAKVQWKV | |
| | PPCPAPEAAGGPSVFLFPP | | DNALQSGNSQESV | |
| | KPKDTLMISRTPEVTCVVV | | TEQDSKDSTYSLS | |
| | DVSQEDPEVQFNWYVDGVE | | STLTLSKADYEKH | |
| | VHNAKTKPREEQFNSTYRV | | KVYACEVTHQGLS | |
| | VSVLTVLHQDWLNGKEYKC | | SPVTKSFNRGEC | |
| | KVSNKGLPSSIEKTISKAK | | | |
| | GQPREPQVYTLPPSQEEMT | | | |
| | KNQVSLTCLVKGFYPSDIA | | | |
| | VEWESNGQPENNYKTTPPV | | | |
| | LDSDGSFFLYSRLTVDKSR | | | |
| | WQEGNVFSCSVMHEALHNH | | | |
| | YTQKSLSLSLGK | | | |
| IAPB23 | EVQLLESGGGLVQPGGSLR | 224 | EIVLTQSPATLSL | 225 |
| | LSCAASGFTFSNYWMNWV | | SPGERATLSCRAS | |
| | RQAPGKGLEWVSAIRYDGG | | QSVSSYLAWYQQK | |
| | SKYYADSVKGRFTISRDNS | | PGQAPRLLIYDAS | |
| | KNTLYLQMNSLRAEDTAV | | NRATGIPARFSGS | |
| | YYCAKDAYPPYSFDYWGQ | | GSGTDFTLTISSL | |
| | GTLVTVSSASTKGPSVFPL | | EPEDFAVYYCQQR | |
| | APCSRSTSESTAALGCLVK | | SNWPLTFGQGTKV | |
| | DYFPEPVTVSWNSGALTSG | | EIKRTVAAPSVFI | |
| | VHTFPAVLQSSGLYSLSSV | | FPPSDEQLKSGTA | |
| | VTVPSSSLGTKTYTCNVDH | | SVVCLLNNFYPRE | |
| | KPSNTKVDKRVESKYGPPC | | AKVQWKVDNALQS | |
| | PPCPAPEAAGGPSVFLFPP | | GNSQESVTEQDSK | |
| | KPKDTLMISRTPEVTCVVV | | DSTYSLSSTLTLS | |
| | DVSQEDPEVQFNWYVDGVE | | KADYEKHKVYACE | |
| | VHNAKTKPREEQFNSTYRV | | VTHQGLSSPVTKS | |
| | VSVLTVLHQDWLNGKEYKC | | FNRGEC | |
| | KVSNKGLPSSIEKTISKAK | | | |
| | GQPREPQVYTLPPSQEEMT | | | |
| | KNQVSLTCLVKGFYPSDIA | | | |
| | VEWESNGQPENNYKTTPPV | | | |
| | LDSDGSFFLYSRLTVDKSR | | | |
| | WQEGNVFSCSVMHEALHNH | | | |
| | YTQKSLSLSLGK | | | |
| IAPB25 | EVQLLESGGGLVQPGGSLR | 226 | DIQMTQSPSSLSA | 227 |
| | LSCAASGFTFSSYAMSWVR | | SVGDRVTITCRAS | |
| | QAPGKGLEWVSAISGSGGS | | QSISSYLNWYQQK | |
| | TYYADSVKGRFTISRDNSK | | PGKAPKLLIYAAS | |
| | NTLYLQMNSLRAEDTAVY | | SLQSGVPSRFSGS | |
| | YCAKGDEYYYPDPLDYWG | | GSGTDFTLTISSL | |
| | QGTLVTVSSASTKGPSVFP | | QPEDFATYYCQQS | |
| | LAPCSRSTSESTAALGCLV | | YSTPLTFGQGTKV | |
| | KDYFPEPVTVSWNSGALT | | EIKRTVAAPSVFI | |
| | SGVHTFPAVLQSSGLYSLS | | FPPSDEQLKSGTA | |
| | SVVTVPSSSLGTKTYTCN | | SVVCLLNNFYPRE | |
| | VDHKPSNTKVDKRVESKYG | | AKVQWKVDNALQS | |
| | PPCPPCPAPEAAGGPSVFL | | GNSQESVTEQDSK | |
| | FPPKPKDTLMISRTPEVTC | | DSTYSLSSTLTLS | |
| | VVVDVSQEDPEVQFNWYVD | | KADYEKHKVYACE | |
| | GVEVHNAKTKPREEQFNST | | VTHQGLSSPVTKS | |
| | YRVYSVLTVLHQDWLNGKE | | FNRGEC | |
| | YKCKVSNKGLPSSIEKTIS | | | |
| | KAKGQPREPQVYTLPPSQE | | | |
| | EMTKNQVSLTCLVKGFYPS | | | |
| | DIAVEWESNGQPENNYKTT | | | |
| | PPVLDSDGSFFLYSRLTVD | | | |
| | KSRWQEGNVFSCSVMHEAL | | | |
| | HNHYTQKSLSLSLGK | | | |
| IAPB29 | EVQLLESGGGLVQPGGSLR | 228 | DIQMTQSPSSLSA | 227 |
| | LSCAASGFTFSNYAMSWVR | | SVGDRVTITCRAS | |
| | QAPGKGLEWVSAISGSGGS | | QSISSYLNWYQQK | |
| | TYYADSVKGRFTISRDNSK | | PGKAPKLLIYAAS | |
| | NTLYLQMNSLRAEDTAVY | | SLQSGVPSRFSGS | |
| | YCAKEWSSYFGLDYWGQG | | GSGTDFTLTISSL | |
| | TLVTVSSASTKGPSVFPLA | | QPEDFATYYCQQS | |
| | PCSRSTSESTAALGCLVKD | | YSTPLTFGQGTKV | |
| | YFPEPVTVSWNSGALTSGV | | EIKRTVAAPSVFI | |
| | HTFPAVLQSSGLYSLSSVV | | FPPSDEQLKSGTA | |
| | TVPSSSLGTKTYTCNVDHK | | SVVCLLNNFYPRE | |
| | PSNTKVDKRVESKYGPPCP | | AKVQWKVDNALQS | |
| | PCPAPEAAGGPSVFLFPPK | | GNSQESVTEQDSK | |
| | PKDTLMISRTPEVTCVVVD | | DSTYSLSSTLTLS | |
| | VSQEDPEVQFNWYVDGVEV | | KADYEKHKVYACE | |
| | HNAKTKPREEQFNSTYRVV | | VTHQGLSSPVTKS | |
| | SVLTVLHQDWLNGKEYKCK | | FNRGEC | |
| | VSNKGLPSSIEKTISKAKG | | | |
| | QPREPQVYTLPPSQEEMTK | | | |
| | NQVSLTCLVKGFYPSDIAV | | | |
| | EWESNGQPENNYKTTPPVL | | | |
| | DSDGSFFLYSRLTVDKSRW | | | |
| | QEGNVFSCSVMHEALHNHY | | | |
| | TQKSLSLSLGK | | | |
| IAPB9 | QVQLVQSGAEVKKPGSSVK | 229 | DIQMTQSPSSLSA | 227 |
| | VSCKASGGTFSSYAISWVR | | SVGDRVTITCRAS | |
| | QAPGQGLEWMGWISPIFGT | | QSISSYLNWYQQK | |
| | ANYAQKFQGRVTITADEST | | PGKAPKLLIYAAS | |
| | STAYMELSSLRSEDTAVYY | | SLQSGVPSRFSGS | |
| | CARRYDNFARSGDLDYWG | | GSGTDFTLTISSL | |
| | QGTLVTVSSASTKGPSVFP | | QPEDFATYYCQQS | |
| | LAPCSRSTSESTAALGCLV | | YSTPLTFGQGTKV | |
| | KDYFPEPYTVSWNSGALTS | | EIKRTVAAPSVFI | |
| | GVHTFPAVLQSSGLYSLSS | | FPPSDEQLKSGTA | |
| | VVTVPSSSLGTKTYTCNVD | | SVVCLLNNFYPRE | |
| | HKPSNTKVDKRVESKYGPP | | AKVQWKVDNALQS | |
| | CPPCPAPEAAGGPSVFLFP | | GNSQESVTEQDSK | |
| | PKPKDTLMISRTPEVTCVV | | DSTYSLSSTLTLS | |
| | VDVSQEDPEVQFNWYVDGV | | KADYEKHKVYACE | |
| | EVHNAKTKPREEQFNSTYR | | VTHQGLSSPVTKS | |
| | VVSVLTVLHQDWLNGKEYK | | FNRGEC | |
| | CKVSNKGLPSSIEKTISKA | | | |
| | KGQPREPQVYTLPPSQEEM | | | |
| | TKNQVSLTCLVKGFYPSDI | | | |
| | AVEWESNGQPENNYKTTPP | | | |
| | VLDSDGSFFLYSRLTVDKS | | | |
| | RWQEGNVFSCSVMHEALHN | | | |
| | HYTQKSLSLSLGK | | | |
| IAPB55 | QLQLQESGPGLVKPSETLS | 633 | EIVMTQSPATLSV | 230 |
| | LTCTVSGVSISSSTYYWGW | | SPGERATLSCRAS | |
| | LRQPPGMGLEWTGSIYFTG | | QFISSNLAWYQQK | |
| | NTYYNPSLKSRVTISVDTS | | PGQAPRLLIYGAS | |
| | RNQFSLKLSSVTAADTAVY | | TRATGIPARFSGS | |
| | YCGSLFGDYGYFDYWGQGT | | GSGTDFTLTISSL | |
| | LVTVSSASTKGPSVFPLAP | | QSEDFAVYYCQQY | |
| | CSRSTSESTAALGCLVKDY | | NNWPFTFGPGHCV | |
| | FPEPVTVSWNSGALTSGVH | | DIKRTVAAPSVFI | |
| | TFPAVLQSSGLYSLSSVVT | | FPPSDEQLKSGTA | |
| | VPSSSLGTKTYTCNVDHKP | | SVVCLLNNFYPRE | |
| | SNTKVDKRVESKYGPPCPP | | AKVQWKVDNALQS | |
| | CPAPEAAGGPSVFLEPPKP | | GNSQESVTEQDSK | |
| | KDTLMISRTPEVTCVVVDV | | DSTYSLSSTLTLS | |
| | SQEDPEVQFNWYVDGVEVH | | KADYEKHKVYACE | |
| | NAKTKPREEQFNSTYRVVS | | VTHQGLSSPVTKS | |
| | VLTVLHQDWLNGKEYKCKV | | FNRGEC | |
| | SNKGLPSSIEKTISKAKGQ | | | |
| | PREPQVYTLPPSQEEMTKN | | | |
| | QVSLTCLVKGFYPSDIAVE | | | |
| | WESNGQPENNYKTTPPVLD | | | |
| | SDGSFFLYSRLTVDKSRWQ | | | |
| | EGNVFSCSVMHEALHNHYT | | | |
| | QKSLSLSLGK | | | |
| IAPB63 | QVQLVQSGSELKKPGASVK | 219 | QSALTQPRSVSGS | 231 |
| | VSCKASGYTFNTYAMNWV | | PGHSVTISCTGTS | |
| | RQAPGQGLEWMGWINTNT | | SDVGDYNYVSWYQ | |
| | GNPTYAQGFTGRFVFSLDT | | QRPGKVPKLLIYD | |
| | SVSTAYLQISSLKAEDTAV | | VSKRPSGVPDRFS | |
| | YYCARRYFDWLLGAFDIWG | | GSKSGNTASLTIS | |
| | QGTMVTVSSASTKGPSVFP | | GLQAEDEAIYFCA | |
| | LAPCSRSTSESTAALGCLV | | SYAGNYNVVFGGG | |
| | KDYFPEPVTVSWNSGALTS | | TKLTVLGQPKAAP | |
| | GVHTFPAVLQSSGLYSLSS | | SVTLFPPSSEELQ | |
| | VVTVPSSSLGTKTYTCNVD | | ANKATLVCLISDF | |
| | HKPSNTKVDKRVESKYGPP | | YPGAVTVAWKADS | |
| | CPPCPAPEAAGGPSVFLFP | | SPVKAGVETTTPS | |
| | PKPKDTLMISRTPEVTCVV | | KQSNNKYAASSYL | |
| | VDVSQEDPEVQFNWYVDGV | | SLTPEQWKSHRSY | |
| | EVHNAKTKPREEQFNSTYR | | SCQVTHEGSTVEK | |
| | VVSVLTVLHQDWLNGKEYK | | TVAPTECS | |
| | CKVSNKGLPSSIEKTISKA | | | |
| | KGQPREPQVYTLPPSQEEM | | | |
| | TKNQVSLTCLVKGFYPSDI | | | |
| | AVEWESNGQPENNYKTTPP | | | |
| | VLDSDGSFFLYSRLTVDKS | | | |
| | RWQEGNVFSCSVMHEALHN | | | |
| | HYTQKSLSLSLGK | | | |
| IAPB64 | QVQLVQSGSELKKPGASVK | 219 | QSALTQPRSVSGS | 232 |
| | VSCKASGYTFNTYAMNWV | | PGHSVTISCTGTS | |
| | RQAPGQGLEWMGWINTNT | | SDVGDYNYVSWYQ | |
| | GNPTYAQGFTGRFVFSLDT | | QRPGKVPKLLIYD | |
| | SVSTAYLQISSLKAEDTAV | | VSKRPSGVPDRFS | |
| | YYCARRYFDWLLGAFDIWG | | GSKSGNTASLTIS | |
| | QGTMVTVSSASTKGPSVFP | | GLQAEDEAIYFCS | |
| | LAPCSRSTSESTAALGCLV | | SYAGNYNVVFGGG | |
| | KDYFPEPVTVSWNSGALTS | | TKLTVLGQPKAAP | |
| | GVHTFPAVLQSSGLYSLSS | | SVTLFPPSSEELQ | |
| | VVTVPSSSLGTKTYTCNVD | | ANKATLVCLISDF | |
| | HKPSNTKVDKRVESKYGPP | | YPGAVTVAWKADS | |
| | CPPCPAPEAAGGPSVFLFP | | SPVKAGVETTTPS | |
| | PKPKDTLMISRTPEVTCVV | | KQSNNKYAASSYL | |
| | VDVSQEDPEVQFNWYVDGV | | SLTPEQWKSHRSY | |
| | EVHNAKTKPREEQFNSTYR | | SCQVTHEGSTVEK | |
| | VVSVLTVLHQDWLNGKEYK | | TVAPTECS | |
| | CKVSNKGLPSSIEKTISKA | | | |
| | KGQPREPQVYTLPPSQEEM | | | |
| | TKNQVSLTCLVKGFYPSDI | | | |
| | AVEWESNGQPENNYKTTPP | | | |
| | VLDSDGSFFLYSRLTVDKS | | | |
| | RWQEGNVFSCSVMHEALH | | | |
| | NHYTQKSLSLSLGK | | | |
| IAPB65 | QVQLVQSGAEVKKPGSSVK | 233 | EIVLTQSPATLSL | 234 |
| | VSCKASGGTFSSYAISWVR | | SPGERATLSCRAS | |
| | QAPGQGLEWMGGISAIFGT | | QSVSNFLAWYQQK | |
| | ANYAQKFQGRVTITADEST | | PGQAPRLLIYGAS | |
| | STAYMELSSLRSEDTAVYY | | NRATGIPARFSGS | |
| | CARHLHNAIHLDYWGQGT | | GSGTDFTLTISSL | |
| | LVTVSSASTKGPSVFPLAP | | EPEDFAVYYCQQG | |
| | CSRSTSESTAALGCLVKDY | | KHWPWTFGQGTKV | |
| | FPEPVTVSWNSGALTSGVH | | EIKRTVAAPSVFI | |
| | TFPAVLQSSGLYSLSSVVT | | FPPSDEQLKSGTA | |
| | VPSSSLGTKTYTCNVDHKP | | SVVCLLNNFYPRE | |
| | SNTKVDKRVESKYGPPCPP | | AKVQWKVDNALQS | |
| | CPAPEAAGGPSVFLFPPKP | | GNSQESVTEQDSK | |
| | KDTLMISRTPEVTCVVVDV | | DSTYSLSSTLTLS | |
| | SQEDPEVQFNWYVDGVEVH | | KADYEKHKVYACE | |
| | NAKTKPREEQFNSTYRVVS | | VTHQGLSSPVTKS | |
| | VLTVLHQDWLNGKEYKCKV | | FNRGEC | |
| | SNKGLPSSIEKTISKAKGQ | | | |
| | PREPQVYTLPPSQEEMTKN | | | |
| | QVSLTCLVKGFYPSDLAVE | | | |
| | WESNGQPENNYKTTPPVLD | | | |
| | SDGSFFLYSRLTVDKSRWQ | | | |
| | EGNVFSCSVMHEALHNHYT | | | |
| | QKSLSLSLGK | | | |

[0750] 4-1 Evaluation of IL1RAP Bispecific Antibodies in a Whole Blood T Cell Cytotoxicity Assay

[0751] Methods:

[0752] Tumor cell line LAMA-84 was washed with DPBS before incubation with CFSE (resuspended in 150 μL DMSO and diluted 1:10,000) at 10×10⁶ cells/mL of CFSE for 8 minutes at room temperature. Staining was quenched with HI FBS and washed in media before resuspension in complete media at 2×10⁵ cells/mL. Equal volumes of whole blood and CFSE-stained tumor cells were combined in each well of a 96-well plate. After the addition of antibody (resuspended in 10 μL of DPBS) in respective wells, all plates were incubated at 37° C. with 5% CO2 for 48 hours. Undiluted CD25-PE was added directly to each well of whole blood and incubated for 30 minutes at room temperature, protected from light. Cells were then centrifuged at 1500 rpm for 5 minutes and lysed with 200 uL of multi-specie red lysis buffer, repeated 4 more times. Cells were washed in DPBS once and stained with Live/Dead Near-IR (diluted in DPBS) for 15 minutes (Table 36). Each well was washed and resuspended in FACS buffer before the cells were acquired on a BD FACS CANTO II.

TABLE 36
Whole Blood T cell cytotoxicity staining panel

| Antigen | Channel | Clone | Dilution | Source | Catalog # |
|---|---|---|---|---|---|
| CD25 | PE | BC96 | 1:100 | Biolegend | 302606 |
| CD4 | PerCP | RPA-T4 | 1:100 | Biolegend | 300528 |
| CD8 | APC | HIT8a | 1:100 | Biolegend | 300912 |
| Live/Dead | APC-Cy7 | NA* | 1:200 | Invitrogen | L34976 |

*NA = not applicable

[0753] The cell acquisition on the FACS CANTO II (Becton, Dickinson and Company, Franklin Lakes, N.J.) was limited to 1×10⁴ tumor cells. Tumor cell death was assessed by gating on FSC and SSC to identify cell populations, then CFSE positive tumor events, and finally Live/Dead Near-IR to assess tumor cytotoxicity. T-cell activation was assessed by gating on FSC and SSC to identify cell populations, CFSE negative events, Near-IR negative events to assess live cells, then CD25 positive cells. The percentage of either dead tumor cells or CD25 positive cells were graphed using GraphPad Prism 6 and analyzed with a non-linear curve fit. Additional statistical analysis was evaluated in the program “R” to determine population EC₅₀ values using a nonlinear mixed-effects model.

[0754] Results:

[0755] To mimic physiological peripheral whole blood conditions containing sIL1RAP, IC3B19 (IAPB57×CD3B219) and IC3B34 (IAPB57×CD3B376) were evaluated in an ex vivo T cell redirection assay utilizing whole blood. Exogenously added IL1RAP⁺ LAMA-84 cell line (2×10⁴ cells/well) was added to healthy control human peripheral whole blood (n=15 donor samples) with IC3B19, IC3B34, and null arm control bispecific antibodies for 48 hours. As shown in FIG. 52, IC3B19 and IC3B34 induced similar T-cell mediated cytotoxicity of IL1RAP⁺ LAMA-84 cell line ex vivo after 48 hours. The EC₅₀ values for IC3B19 and IC3B34 cytotoxicity, represented FIG. 52 were 2.097 and 2.762, respectively (Table 37). Similarly, the EC₅₀ values for T-cell activation (CD25) by IC3B19 and IC3B34 represented by FIG. 53 were 4.237 and 7.825 nM, respectively (Table 38). All of the null arm control bispecific antibodies did not induce detectable levels of cytotoxicity or T-cell activation as shown in FIG. 52 and FIG. 53. The general level of cytotoxicity and T-cell activation were similar between both IC3B19 and IC3B34.

TABLE 37
IC3B19 and IC3B34 Cytotoxicity EC50 (nM)
Concentrations in the LAMA-84 cell line

| Effective Concentration (nM) | IC3B19 | IC3B34 |
|---|---|---|
| EC₅₀ | 2.097 | 2.762 |

TABLE 38
IC3B19 and IC3B34 T-cell Activation EC50 (nM)
Concentrations in the LAMA-84 cell line

| Effective Concentration (nM) | IC3B19 | IC3B34 |
|---|---|---|
| EC50 | 4.237 | 7.825 |

[0756] 4-2 Evaluation of Cytokine Release by IL1RAP×CD3 Bispecific Abs in a Whole Blood T Cell Cytotoxicity Assay at 24 and 48 Hours

[0757] Methods:

[0758] Frozen supernatants from 24 hour and 48 hour samples from Example 4-1 were thawed on wet ice. Prior to use, plates were centrifuged at 500 g for 5 minutes at 4° C., then placed back on wet ice. Serial dilutions were prepared in U-bottom 96-well plates (Falcon), using MSD Diluent 2 at 1:2, 1:25, and 1:1000 dilution ratios for ELISA.

[0759] While supernatants were being centrifuged, MSD Assay Plates (ProInflammatory Panel I V-Plex, Catalog # K15049G-4, Lot # K008572) were pre-washed per manufacturer's protocol. A standard curve was prepared by reconstituting the provided calibrator in 1.0 mL of MSD Diluent 2. Fifty microliters of each sample or standard was added directly to pre-washed MSD plates. Subsequent incubations and washes were all carried out per manufacturer's protocol. Assay plates were read on the MSD Sector Imager.

[0760] Two methods were used to compare response between IC3B19 and IC3B34:

[0761] Linear Regression with Mixed Effects

[0762] In this method, a linear regression model with fixed effects for compound, dose, and compound by dose interaction and random effects that take into account the paired donors was constructed. Post-hoc comparisons were then between IC3B19 and IC3B34 were made at each concentration and p-values were appropriately adjusted for multiple comparisons.

[0763] Non-Linear (Four-Parameter) Regression with Mixed Effects

[0764] IC3B19 and IC3B34 were modeled together using a non-linear regression model, with fixed effect parameters for minimum, maximum, log EC50, and slope for each compound, and a random effect term that takes into account paired donor effect. Point estimates and their confidence intervals were extracted and plotted for visual comparison from these separate models. Testing significant differences for each parameter was done by constructing a model that used a joint estimate for the parameter of interest, then comparing that model to the original model using a log-likelihood test. To elaborate, there is a model with parameters for IC3B19 minimum, IC3B19 maximum, IC3B19 log EC50, IC3B19 slope, IC3B34 minimum, IC3B34 maximum, IC3B34 log EC50, and IC3B34 slope. To check whether the minimums are the significantly different, a second model is constructed that has all the same parameter except that there is a single shared parameter for the minimum. The log likelihood (an overall measure of how well the model fits the data) of the first model is compared to the log likelihood of the second model. If they are not significantly different from each other, then we can conclude that the minimums are not significantly different from each other. Similarly, if the log likelihoods are significantly different from one another, then we would conclude that the minimums are significantly different.

[0765] In a number of cases, models or parameter comparisons were inestimable for one of two reasons: 1. the data was to intractable to calculate the four-parameter logistic regression itself, or 2. the difference between the parameter estimates was so large that is caused the joint model to fail. In the first case, results are not reported and in the summary table they are indicated with “NA”. In the second, results are also not reported, but they are indicated in the summary table as “Sig.”, as short-hand for significant. As the 95% confidence intervals around these parameters are individually estimable and do not overlap, we can consider them significantly different but the exact p-value is unknown.

[0766] Differences are considered statistically significant at p-value less than or equal to 0.05. All analyses were conducted in R, version 3.3.2.

[0767] Results:

[0768] IC3B19 and IC3B34 mediated engagement of T cells and IL1RAP+ target cell line LAMA-84 (endogenous and exogenously added tumor cells) resulted in T cell cytokine release. To determine cytokine release difference between IC3B19 and IC3B34, supernatants were evaluated for 10 pro-inflammatory cytokines from whole blood (n=15 donors) cytotoxicity and T-cell activation assays with exogenous LAMA-84 IL1RAP+ tumor cell line added, as discussed in section example 1. Of the 10 cytokines evaluated, most cytokines resulted in a measurable dose dependent release in response to both IC3B19 and IC3B34, except for IL-8 and IL-12p70. As shown in Table 39, IL-10, IL-2, TNF-α, and INF-γ resulted in the most potent EC50 (nM) release. In addition, the majority of cytokines and at both time points, the IC3B34 molecule resulted in a less potent EC50 (nM) that was statistically significant. The exception were, IL-4 (24 hours), IL-6 (24 and 48 hours), IL-8 (24 and 48 hours), IL-12p70 (24 and 48 hours), IL-13 (24 hours), INF-γ (24 and 48 hours), and TNF-α (24 hours), which did not have a statistically significant difference in EC50 (nM) values between IC3B19 and IC3B34.

TABLE 39
IC3B19 and IC3B34 Four Parameter Logistic Regression Summary Table.
Bold text denotes statistical significant difference in EC50 (nM)
values between IC3B19 and IC3B34. Results of individual cytokine
release experiments are shown in the FIG. Nos. indicated.

| Cytokine | FIG. No. | Experiment | EC50 | Slope | Minimum | Maximum |
|---|---|---|---|---|---|---|
| IL-lbeta | FIG. 36 | 24 hours | 0.0027 | 0.3046 | 0.0268 | 0.2033 |
| IL-lbeta | FIG. 37 | 48 hours | 0.0010 | 0.3951 | 0.2543 | 0.0528 |
| IL-2 | FIG. 38 | 24 hours | 0.0001 | 0.0256 | 0.3103 | 0.6466 |
| IL-2 | FIG. 39 | 48 hours | Sig. | 0.2079 | 0.0158 | 0.0008 |
| IL-4 | FIG. 40 | 24 hours | 0.2415 | 0.4668 | 0.2942 | 0.0043 |
| IL-4 | FIG. 41 | 48 hours | NA | NA | NA | NA |
| IL-6 | FIG. 42 | 24 hours | Sig. | 0.0819 | 0.1151 | 0.5224 |
| IL-6 | FIG. 43 | 48 hours | NA | NA | NA | NA |
| IL-8 | FIG. 44 | 24 hours | NA | NA | NA | NA |
| IL-8 | FIG. 45 | 48 hours | NA | NA | NA | NA |
| IL-10 | FIG. 46 | 24 hours | <0.0001 | 0.0010 | 0.3406 | 0.7036 |
| IL-10 | FIG. 47 | 48 hours | <0.0001 | 0.2702 | 0.0011 | 0.0004 |
| IL-12p70 | FIG. 48 | 24 hours | NA | NA | NA | NA |
| IL-12p70 | FIG. 49 | 48 hours | NA | NA | NA | NA |
| IL-13 | FIG. 50 | 24 hours | NA | NA | NA | NA |
| IL-13 | FIG. 51 | 48 hours | 0.0106 | 0.8268 | <0.0001 | <0.0001 |
| IFN-gamma | FIG. 52 | 24 hours | 0.0065 | 0.6920 | 0.4644 | 0.3179 |
| IFN-gamma | FIG. 53 | 48 hours | 0.0266 | 0.1678 | 0.2695 | 0.0319 |
| TNF-alpha | FIG. 54 | 24 hours | 0.0016 | 0.0128 | 0.1443 | 0.7895 |
| TNF-alpha | FIG. 55 | 48 hours | 0.0004 | 0.5553 | 0.0043 | 0.5216 |

[0769] 4-3 Evaluation of IL1RAP Bispecific Antibodies in a Caspase Cytotoxicity Assay

[0770] T-cell mediated killing of IC3B19 and IC3B34 was measured using a second type of cell toxicity assay. The caspase cytotoxicity assay indirectly measures cell killing via cleavage of a fluorescent substrate by active caspase 3/7. Cleavage of the substrate results in a fluorescent DNA dye, with fluorescence restricted to the cell nucleus. Repeated fluorescence measurements are taken in each well throughout the course of the assay, using a motorized 10× objective, capable of precisely imaging well(s) at the same coordinates. Target cell populations are identified based on defined size restrictions.

[0771] Frozen Pan CD3+ T-cells (purchased from Biological Specialty Corporation, Colmar, Pa.) were isolated by negative selection from normal healthy donors. Target cells (NCI-H1975 cells, a human lung adenocarcinoma cell line expressing IL1RAP), were cultured in RPMI 1640/Glutamax (25 mM HEPES buffer) medium supplemented with 10% heat inactivated FBS, 1 mM sodium pyruvate, and 0.1 mM non-essential amino acids (Life Technologies).

[0772] Target cells were plated at 20,000 cells/well in 50 ul of phenol-red free RPMI media containing supplements 16 hours prior to experiment initiation into tissue culture-treated, clear flat bottom plates (Costar). The cells were allowed to incubate at room temperature (RT) for 20 min to allow for even distribution of cells in the wells, and then the cells were allowed to incubate at 37° C. and 5% CO2 overnight.

[0773] On the day of the experiment, T-cells were counted and diluted to 1.0*10\hat{ }6 cells/ml in phenol red free RPMI media containing supplements and combined with Nuc-View TM488 Caspase-3/7 Substrate (Essen Biosciences) for a working concentration of 10 uM. 100 ul of the combined T-cells and the Caspase-3/7 substrate were added to each well for a final concentration of 5 uM of the Caspase-3/7 substrate.

[0774] IC3B19 (IAPB57×CD3B219), IC3B34 (IAPB57×CD3B376), CD3B288 (Null×CD3B219), and IAPB57×Null (IAPB101) bispecific antibodies were prepared at 4× final concentration in phenol red free RPMI media containing supplements and 50 uL of the antibodies were added to each well. After a 20 min incubation at RT to allow for even distribution in the wells, plates were transferred to the Zoom Incucyte instrument (Essen Bioscience). The Incucyte Instrument resides in a humidified incubator set at 37° C., 5% CO2.

[0775] A processing definition on the Incucyte was designed for the NCI-H1975 cells. This processing definition clearly identifies caspase activity of target cells, while excluding the T-cells by size. Measurements were taken at TO and every six hours for up to 120 hours. The maximum signal was determined to be at 72 hours post treatment at which time the data was analyzed.

[0776] After the assay was complete, each plate was analyzed using the NCI-H1975 processing definition. Raw fluorescent data was exported from the Incucyte Zoom software, and pasted into GraphPad Prism (GraphPad Software, Inc., La Jolla, Calif.). Caspase 3/7 activity was determined by calculating the area under the curve (AUC) for each well in GraphPad. AUC values were plotted as a function of Log 10 nM antibody concentrations. The EC50 for each concentration response curve, in nanomolar (nM), was reported following non-linear regression (Sigmoidal dose-response-variable slope). Each assay contained two technical replicates and four measurements within each technical replicate.

[0777] Both IC3B19 and IC3B34, but not the bispecific antibodies with null arms (IAPB57×B23B49 or B23B39×CD3B219), induced target specific cytoxicity in NCI-H1975 cells (FIG. 56). In this assay, the cytotoxicity EC50s vary three-fold between IC3B19 and IC3B34, with values of 0.018 and 0.057 nM, respectively.

[0778] 4-4 Efficacy of IAPB57×CD3B376 in H1975 Human NSCLC Xenografts in T Cell Humanized NSG Mice

[0779] Efficacy of IAPB57×CD3B376 bispecific antibody IC3B34 was evaluated in established H1975 human Non-small cell lung cancer (NSCLC) xenografts in female NOD.Cg-Prkdcscid Il2rgtm1Wjl/SzJ (NSG) mice humanized with human T cells. IAPB57×CD3B376 at 0.1, 0.35 or 1 mg/kg or Null×CD3 antibody control was dosed on Days 14, 18, 21 and 25 for a total of 4 doses. On day 29 post-tumor implant, which was the last date of the study when ten animals remained per group, tumor growth inhibition (% TGI) was calculated. Statistically significant tumor growth inhibition was observed with IAPB57×CD3B376 at 0.35 and 1 mg/kg with 63% and 89% TGI, respectively compared to Null×CD3 control (Two-way ANOVA with Bonferroni test, p<0.0001, FIG. 57).

[0780] 5 CD33 Antibodies

[0781] 5-1 Antigen Generation

[0782] The human and cyno CD33 proteins were produced with or without a mutated monomeric form of human serum albumin (HSA), Uniprot P02768 with a C58S mutation, fused at the C-terminus for immunizations and assays. The cDNAs encoding the CD33 protein antigens with a six-histidine tag (SEQ ID NO: 596) were synthetically synthesized and cloned into a mammalian secretion expression vector under the Actin promoter using standard molecular biology techniques.

[0783] The full-length human CD33 extracellular domain (ECD) derived from Uniprot P20138 (SEQ ID NO:235) (human CD33 ECD) was fused at the N-terminus with a signal sequence and with or without the HSA, followed by a six histidine tag (SEQ ID NO: 596) at the C-terminus, (hCD33 ECD with HSA and hCD33 ECD only). The human CD33 ECD expression construct was transiently transfected into HEK293 derived cells, Expi293 (Gibco/Thermo Fisher Scientific; Waltham, Mass.) using Expifectamine according to manufacturer protocol. Cells were incubated 5 days at 37° C. with 8% CO2 on an orbital shaker before harvesting. The expressed cells were removed by centrifugation and the soluble CD33 was purified from the media using immobilized metal affinity chromatography using Ni Sepharose 6 Fast Flow resin (GE Healthcare; Little Chalfont, United Kingdom) followed by Superdex 200 preparative size exclusion chromatography (SEC) (GE Healthcare) in Dubelcco's Phosphate Saline buffer pH 7.2 (1×DPBS). SEC elution fractions excluding any disulfide aggregates were combined and sterile filtered to yield the final protein for immunization and CD33 assays. Protein concentration was determined by A280 and quality of purified protein was assessed by SDS-PAGE and analytical SEC (Phenomenex; Torrance, Calif.). Endotoxin measurements were performed using EndoSafe-PTS Cartridges, a chromogenic LAL assay (Charles River; Wilmington, Mass.).

[0784] The human CD33 ECD subdomain proteins, hCD33 V-domain-HSA, hCD33 V-domain-his, hCD33 C2 domain-HSA, and hCD33 C2 domain-His, were similarly constructed, expressed and purified as the full-length human CD33 ECD.

[0785] Cyno CD33 constructs for immunization and cross selectivity assays, cyno CD33 ECD-HSA, cyno CD33-His, were also generated based on the Genbank sequence XP_005590138.1. Cyno CD33 protein expression and purification were same as the human CD33 proteins.

[0786] The CD33 antigens for screening were biotinylated in 50 mM Na Phosphate pH 7.2 using SureLink Chromagenic Biotin Labeling kit (SeraCare KPL) according to manufacturer conditions. Briefly, a biotin stock of 25 mM was added to the CD33 protein at a 4:1 molar ratio of biotin to protein and incubated at room temperature for 30 minutes with gentle rotation and then switched to 4° C. for 2 more hours. Unincorporated biotin was removed by buffer exchange into 1×DPBS. Protein concentration and biotin incorporation was determined by measuring at A280 nm and A354 nm using NanoDrop. See Table 40 for the sequences of each of the antigens described above.

TABLE 40
Antigen Sequences

| Protein Name | Protein ID | SEQ ID NO |
|---|---|---|
| Cyno CD33 ECD-HSA | C33W1 | 236 |
| Human CD33 ECD-HSA | C33W2 | 237 |
| Human CD33-V-HSA | C33W3 | 238 |
| Human CD33-C2-HSA | C33W4 | 239 |
| Human CD33-V-His | C33W8 | 240 |
| Human CD33 C2-His | C33W9 | 241 |
| Human CD33 ECD-His | C33W49 | 242 |
| Cyno CD33 ECD-His | C33W50 | 243 |
| Human CD33 full length | | 244 |
| Cyno CD33 full length | | 245 |

[0787] 5-2 Generation of CD33 Expressing Isogenic Cell Lines

[0788] Human and cyno CD33 expressing cell lines were generated using lentivirus (Genecopoeia; Rockville, Md.) containing full length human CD33 or cyno CD33 and puromycin for selection of CD33 positive cells. HEK293F cells (ATCC), negative for CD33, were transduced with lentiviral particles to overexpress human CD33 and cyno CD33. Following transduction, cells positively expressing CD33 and the resistance marker, were selected by treating pooled cells, grown in DMEM+10% HI FBS (Life Technologies; Carlsbad, Calif.) and supplemented with varying concentrations of Puromycin (Life Technologies).

[0789] In addition to the HEK generated cell lines, several commercial cell lines were used for binding and cellular toxicity assays. These included MOLM13, KG1, SH2, OCIAML3 and MV411 and were obtained from either American Type Culture Collection or Deutsche Sammlung von Mikrooranismen und Zellkulturen, and cultured at 37° C., 5% CO2 in complete RPMI culture media with 10% FBS.

[0790] 5-3 Immunization Campaigns

[0791] OmniRat

[0792] A human immunoglobulin transgenic rat strain (OmniRat®; Ligand Pharmaceuticals; San Diego, Calif.) was used to develop human CD33 monoclonal antibody expressing hybridoma cells. The OmniRat® contains a chimeric human/rat IgH locus (comprising 22 human V_{H}s, all human D and J_{H} segments in natural configuration linked to the rat C_{H} locus) together with fully human IgL loci (12 Vκs linked to Jκ-Cκ and 16 Vλs linked to Jλ-Cλ) (see e.g., Osborn, et al. (2013) J Immunol 190(4): 1481-1490). Accordingly, the rats exhibit reduced expression of rat immunoglobulin, and in response to immunization, the introduced human heavy and light chain transgenes undergo class switching and somatic mutation to generate high affinity chimeric human/rat IgG monoclonal antibodies with fully human variable regions. The preparation and use of OmniRat®, and the genomic modifications carried by such rats, is described in PCT Publication WO 2014/093908 to Bruggemann et al.

[0793] When immunized with recombinant human and cynomolgus CD33 (huCD33 ECD-HSA and cyno CD33 ECD-HSA respectively), this transgenic rat produces chimeric human-rat IgG antibodies to human CD33, some of which also bind to cynomolgus CD33.

[0794] Eight OmniRats were immunized alternately with huCD33 ECD-HSA and cyno CD33 ECD-HSA. Following a 46 day immunization regimen, lymph nodes from all eight OmniRats were harvested and used to generate hybridomas. Eighty-one 96-well plates of hybridoma supernatants were screened via binding ELISA and AlphaLISA using standard techniques, of which 128 hybridoma supernatants were selected for specific binding to huCD33 ECD-HSA and cyno CD33 ECD-HSA. Most of the 128 supernatants were also positive for binding to cells over-expressing huCD33 or cyCD33.

[0795] Six additional OmniRats were immunized with rhuCD33 only. Following a 31 day immunization regimen, lymph nodes from all six OmniRats were harvested and used to generate hybridomas. Thirty 96-well plates of hybridoma supernatants were screened via binding ELISA using standard techniques, of which 94 hybridoma supernatants were selected for specific binding to huCD33 ECD-HSA and cyno CD33 ECD-HSA. Hybridoma lysates were prepared from the positive clones and progressed to v region cloning described below.

[0796] OmniMouse

[0797] A human immunoglobulin transgenic mouse strain (OmniMouse®; Ligand Pharmaceuticals) was used to develop human CD33 monoclonal antibody expressing hybridoma cells. The OmniMouse® contains chimeric human/rat IgH loci together with fully human IgL loci. The mice exhibit reduced expression of mouse immunoglobulin, and in response to immunization, the introduced human heavy and light chain transgenes undergo class switching and somatic mutation to generate high affinity chimeric human/rat IgG monoclonal antibodies with fully human variable regions.

[0798] When immunized with recombinant human and cynomolgus CD33 (huCD33 ECD-HSA and cyno CD33 ECD-HAS respectively), this transgenic mouse produces chimeric human/rat IgG antibodies to human CD33, some of which also bind to cynomolgus CD33.

[0799] Four OmniMice were immunized alternately with huCD33 ECD-HSA and cyno CD33 ECD-HSA. Following a 53 day immunization regimen, spleens and lymph nodes from all four OmniMice were harvested and used to generate hybridomas. Forty-eight 96-well plates of hybridoma supernatants were screened via binding ELISA and AlphaLISA, of which 8 hybridoma supernatants were selected for specific binding to huCD33 ECD-HSA and cyno CD33 ECD-HSA. Hybridoma lysates were prepared from the positive clones and progressed to v region cloning described below.

[0800] V Region Cloning

[0801] Total RNA from hybridoma cell lysates was purified using RNeasy 96 kit (Qiagen; Hilden, Germany) following the manufacturer's protocol, and the resulting RNA was quantitated using Drop Sense and stored at −80° C. or cDNA was synthesized using Invitrogen SuperScript III First-Strand Synthesis System for RT-PCR (Invitrogen; Carlsbad, Calif.). The first strand cDNA Synthesis was carried out using gene specific primers annealed to the constant regions of heavy, kappa, and lambda chains, respectively. The RT-PCR reaction mixture is comprised of up to 3 g of purified RNA, gene specific primer, dNTP mix, reaction buffer, 25 mM MgCl₂, DTT, RNaseOUT™ (40 U/μl, Invitrogen), and SuperScript™ III RT (200 U/μl, Invitrogen Cat #18080-051), and incubate at 50° C. for 50 minutes and 85° C. for 5 minutes. The resulting single-stranded cDNA was stored at −20° C., or the single-stranded DNA was PCR amplified. The PCR reaction was carried out using Platinum Pfx polymerase (Invitrogen). The v-region fragments were amplified by forward and reverse primers annealing to the leader sequences and constant regions of heavy, kappa and lambda chains, respectively, using optimized PCR conditions. The resulting PCR fragments were run on the gel and sequenced using pre-designed primers to obtain v-region sequences. The resulting .abi files of v-region sequences were collected and analyzed by the Sanger v-region sequence analysis program created at Janssen Biologics Discovery. The AA sequences of the recovered v-regions were registered in the internal database, codon optimized and cloned into the pUnder-based expression vector carrying the appropriate constant region of the desired human antibody isotype: IgG1 F405L and IgG4 PAA. A total of 76 OMNIRat antibodies and 8 OMNIMouse antibodies were successfully cloned and proceeded for further characterization. The tables below summarize the sequences from the top 32 identified in the OMNIRat campaigns (see Table 41) and the 8 identified in the OMNIMouse campaign (see Table 42) with several of the OMNIRat antibodies cloned into IgG1 as well as IgG4 PAA and all from the OMNIMouse campaign were cloned into both IgG1 and IgG 4 PAA.

TABLE 41
Antibody sequences identified via
CD33 immunization in OMNIRat

| mAb | HC ID | HC Isotype | LC ID |
|---|---|---|---|
| C33B46 | C33H108 | hulgG1F405L | C33L74 |
| C33B48 | C33H80 | hulgG1F405L | C33L73 |
| C33B52 | C33H42 | hulgG1F405L | C33L8 |
| C33B54 | C33H44 | hulgG1F405L | C33L10 |
| C33B55 | C33H45 | hulgG1F405L | C33L11 |
| C33B56 | C33H46 | hulgG1F405L | IAPL24 |
| C33B61 | C33H48 | hulgG1F405L | C33L58 |
| C33B62 | C33H49 | hulgG1F405L | C33L59 |
| C33B63 | C33H51 | hulgG1F405L | C33L34 |
| C33B64 | C33H52 | hulgG1F405L | N46L109 |
| C33B66 | C33H55 | hulgG1F405L | C33L42 |
| C33B72 | C33H65 | hulgG1F405L | C33L47 |
| C33B73 | C33H66 | hulgG1F405L | C33L60 |
| C33B75 | C33H70 | hulgG1F405L | N46L109 |
| C33B77 | C33H72 | hulgG1F405L | C33L40 |
| C33B79 | C33H74 | hulgG1F405L | C33L38 |
| C33B80 | C33H76 | hulgG1F405L | C33L39 |
| C33B82 | C33H78 | hulgG1F405L | C33L57 |
| C33B83 | C33H81 | hulgG1F405L | C33L53 |
| C33B87 | C33H87 | hulgG1F405L | C33L35 |
| C33B88 | C33H88 | hulgG1F405L | C33L61 |
| C33B89 | C33H90 | hulgG1F405L | C33L51 |
| C33B94 | C33H98 | hulgG1F405L | C33L69 |
| C33B95 | C33H98 | hulgG1F405L | IAPL24 |
| C33B96 | C33H99 | hulgG1F405L | C33L37 |
| C33B101 | C33H69 | hulgG1F405L | C4LL152 |
| C33B107 | C33H68 | hulgG1F405L | C33L17 |
| C33B120 | C33H87 | hulgG1F405L | C33L41 |
| C33B122 | C33H92 | hulgG1F405L | C33L30 |
| C33B123 | C33H91 | hulgG1F405L | C33L44 |
| C33B124 | C33H73 | hulgG1F405L | C33L32 |
| C33B125 | C33H84 | hulgG1F405L | C33L66 |
| C33B760 | C33H45 | huIgG4 PAA | C33L11 |
| C33B777 | C33H65 | huIgG4 PAA | C33L47 |
| C33B778 | C33H66 | huIgG4 PAA | C33L60 |
| C33B782 | C33H72 | huIgG4 PAA | C33L40 |
| C33B792 | C33H87 | huIgG4 PAA | C33L35 |
| C33B799 | C33H98 | huIgG4 PAA | C33L69 |
| C33B806 | C33H69 | huIgG4 PAA | C4LL152 |
| C33B830 | C33H84 | huIgG4 PAA | C33L66 |
| C33B836 | C33H80 | huIgG4 PAA | C33L73 |
| C33B937 | C33H66 | huIgG4 PAA | C33L132 |

HC: Heavy Chain;
LC: Light Chain

TABLE 42
Antibody sequences identified via
CD33 immunization in OMNIMouse

| mAb | HC ID | LC ID |
|---|---|---|
| C33B901 | C33H249 | C33L115 |
| C33B902 | C33H250 | C33L116 |
| C33B903 | C33H251 | C33L117 |
| C33B904 | C33H252 | C33L118 |
| C33B905 | C33H253 | C33L119 |
| C33B906 | C33H254 | C33L120 |
| C33B907 | C33H255 | C33L121 |
| C33B908 | C33H256 | C33L122 |
| C33B909 | C33H249 | C33L115 |
| C33B910 | C33H250 | C33L116 |
| C33B911 | C33H251 | C33L117 |
| C33B912 | C33H252 | C33L118 |
| C33B913 | C33H253 | C33L119 |
| C33B914 | C33H254 | C33L120 |
| C33B915 | C33H255 | C33L121 |
| C33B916 | C33H256 | C33L122 |

HC: Heavy Chain;
LC: Light Chain

[0802] 5-4 Expi293 Small Scale Transfection and Purification

[0803] Antibodies identified in the immunization campaigns and subsequent v region cloning (into IgG1 F405L and IgG4 PAA) were expressed and purified via small 2 ml scale. Expi293™ cells (ThermoFisher Scientific) were seeded at 1.25×10⁵-2.25×10⁵ viable cells/mL density in Expi293™ Expression Medium and cultured in polycarbonate, disposable, sterile, vented, non-baffled Erlenmeyer shake flasks in a 37° C., 7% CO2 shaker incubator (INFORS HT Multitron Pro). For routine cell growth in 125 mL-2 L shake flasks, the shake speed was set to 130 rpm for shakers with a 19 mm shaking diameter. Cells were sub-cultured when density reached log phase growth at 3×10⁶-5×10⁶ viable cells/mL with a 98-99% viability.

[0804] On day of transfection, the viable cell density and percent viability was determined. Cells were transfected at a density of 3×10⁶ viable cells/mL. For optimal transfection, sterile Heavy and Light Chain plasmid DNA at 0.1 mg/mL concentration in TE buffer (10 mM Tris-HCl, 1 mM EDTA, pH 8.0) is used.

[0805] Expi293™ cells were transfected following manufacturer's Transfection protocol (ThermoFisher Publication Number MAN0007814). Transfection was performed in 24-well deepwell plates (GE Healthcare). Briefly, plasmid DNA was diluted with 0.1 mL OptiMEM™ medium (ThermoFisher Scientific) at the following ratio: 0.250 μg Heavy Chain DNA: 0.750 μg Light Chain DNA: 0.5 μg pAdvantage. 5 μL of ExpiFectamine™ 293 Transfection Reagent was diluted and mixed gently with 95 μL OptiMEM™ medium and incubated for 1 min. The diluted ExpiFectamine™ 293 Reagent was added to the diluted DNA, mixed gently and the ExpiFectamine™ 293/plasmid DNA complexes were incubated at room temperature for 40 minutes. Post-incubation, 1.8 mL Expi293™ cells were added to the complexes incubated overnight in a 37° C., 7% CO2 shaker incubator.

[0806] On Day 1 post-transfection, 10 μL ExpiFectamine™ 293 Enhancer land 100 μL Expifectamine 293™ Enhancer 2 were added and the plates were returned to the incubator for an additional 5 days. The culture was harvested on day 6 post-transfection by centrifugation at 850×G for 15 minutes before purification.

[0807] 1.7 mls of clarified expression supernatants prepared above were transferred to a new 96 2 ml deepwell plate. Purification plates were prepared by pipetting 800 μl of a 1:4 mix of MabSelect SuRe (GE Healthcare) and DPBS−/−slurry into every well of a 96 well Acroprep Advance 1 μm glass filter plate (Pall). 200 mbar of vacuum pressure was applied to the plate to remove excess PBS and subsequently washed with 800 μl fresh PBS. 200 mbar vacuum pressure was applied to remove the wash buffer. The clarified supernatants were then transferred to the PBS washed resin, mixed gently and incubated for 15 minutes. Following the incubation, 200 mbar vacuum pressure was applied to remove the supernatant. The MabSelect SuRe was washed three times with PBS and once with 25 mM Sodium Acetate, pH 5 (TEKNOVA; Hollister, Calif.) with 200 mbar vacuum pressure applied between washes to remove excess buffer. mAbs bound to the resin were eluted using 0.1 M Sodium Acetate, pH 3.5 and incubated for 10 minutes for effective dissociation. The filter plate was placed atop a 96 deepwell plate and the eluted mAbs were collected in the bottom plate via centrifugation at 1000 g for 2 minutes. 80 μl of 2.5 M Tris-Actetate, pH 7.2 was added to neutralize the mAbs. The mAbs were dialyzed into PBS overnight in a 96 well DispoDIALYZER plate (Harvard Apparatus; Holliston, Mass.), transferred to a 96 well Acroprep Advance 0.2 □m Supor filter plate (Pall; Port Washington, N.Y.), placed atop a 96 deepwell plate and the protein solutions filtered via centrifugation at 1,500 g for 15 minutes in a desktop centrifuge. Protein concentrations were determined by A280 measurement on the filtrate using a DropSense Instrument (Trinean).

TABLE 43
CD33 mAb Heavy Chain and Light Chain Variable Regions

| | SEQ | |
|---|---|---|
| | ID | |
| | NO | AMINO ACID SEQUENCE |
| HC ID | | |
| B23H1 | 246 | QITLKESGPTLVKPTQTLTLTCTFSGFSLSTSGMGVSWIRQPPGKALEWLAHIYWDDDKRYNPS |
| | | LKSRLTITKDTSKNQVVLTMTNMDPVDTATYYCARLYGFTYGFAYWGQGTLVTVSS |
| CD3H141 | 247 | EVQLVESGGGLVQPGGSLRLSCAASGFTFNTYAMNWVRQAPGKGLEWVARIRSKYNNYATY |
| | | YAASVKGRFTISRDDSKNSLYLQMNSLKTEDTAVYYCARHGNFGNSYVSWFAYWGQGTLVT |
| | | VSS |
| CD3H219 | 20 | QVQLQQSGPRLVRPSQTLSLTCAISGDSVFNNNAAWSWIRQSPSRGLEWLGRTYYRSKWLYD |
| | | YAVSVKSRITVNPDTSRNQFTLQLNSVTPEDTALYYCARGYSSSFDYWGQGTLVTVSS |
| C33H42 | 248 | QLQLQESGPGLVNPSETLSHTCTVSGGSISSSSHYWGWIRQPPGKGLEWIGKIYYSGNTYYNPS |
| | | LKSRVTISIDTSKNQFSLKMSSVTAADTAVYYCARLADVVVVPAARYFDSWGQGTLVTVSS |
| C33H44 | 249 | QVQLQQSGPGLVKPSQTLSLTCAISGDSVSSNSAAWNWIRQSPSRGLEWLGRTYYRSKWYND |
| | | YAVSVRSRITINPDTSKNQFSLQLNSVTPEDTAVYHCARETMFRGLMDYWGQGTLVTVSS |
| C33H45 | 250 | QVQLVESGGGVVQPGRSLRLSCAASGFTFSSYGMHWVRQSPGKGLEWVAVISYDGSNKYCAD |
| | | SVKGRFTISRDNSKSTLYLQMNSLRAEDTAVYYCAKDFRSLDWLPPDSTSYDGMDVWGQGTT |
| | | VTVSS |
| C33H46 | 251 | QVQLVQSGSELKKPGASVKVSCKASGYTFTNYAMNWVRQAPGQGLEWMGWINTNTGNPTY |
| | | AQAFTGRFVFSLDTSVSTAYLQISSLKAEDTAVYYCARDREVRDYWGQGTLVTVSS |
| C33H48 | 252 | QLQLQESGPGLVKPSETLSLTCTVSGGSIRSTNYYWGWIRQPPGKGLEWIGTIYYSGNTYYNPS |
| | | LKSRVTISVDTSKNQFSLKLSSVTAADTAVYYCARLADVVVVPAARYFDYWGQGILVTVSS |
| C33H49 | 253 | QLQLQESGPGLVKPSETLSLTCTVSGGSIRSSGFYWGWIRQPPRKGLEWIGTIYYSGNTYYNPSL |
| | | KSRVTISVDTSKNQFSLKLSSVTAADTAVYFCARLADVVVVPAARYFDNWGQGTLVTVSS |
| C33H51 | 254 | QLQLQESGPGLVKPSETLSLTCTVSGGSISTGRYYWGWIRQPPGKGVIWIGNIYYSGNTYYNPS |
| | | LKSRVTISVDTSKNQFSLKLNSVTAADTAVYYCARLGSLVVVPAAMSFDYWGQGTLVTVSS |
| C33H52 | 255 | QLQLQESGPGLVKPSETLSLTCTVSGGSIRGSSYYWGWVRQPPGKGLEWIGSIYSSGNTYYNPS |
| | | LKSRVTISVDTSKNQFSLKLSSVTAADTALYYCARLGSLVVVPAAMSFDYWGQGTLVTVSS |
| C33H55 | 256 | QVQLQESGPGLVKPSGTLSLTCAVSGGSISSSNWWSWVRQPPGRGLEWIGEIYHSGNTNNSPSL |
| | | KSRVTISADKSKNQFSLKLSSVTAADTAVYFCARIIAVARYFDSWGQGTLVTVSS |
| C33H65 | 257 | QVQLVESGGGVVQPGRSLRLSCAASGFTFSSYGMHWVRQAPGKGLEWVVVISYDGSNKYYA |
| | | DSVKGRFTISRDNSKNTLYLQMNSLRAEDTAVYYCAKDFRDFDWLPPDSTSYHGMDVWGQG |
| | | TTVTVSS |
| C33H66 | 258 | QVQLVESGGGVVQPGRSLRLSCVASGFTFSSYGMHWVRQAPGKGLEWVAVISYDGSNKYYA |
| | | DSVKGRFTISRDNSKNTLYLQMNSLRAEGTAVYYCAKDFRSFDWLPPDSASYHGMDVWGQG |
| | | TTVTVSS |
| C33H68 | 259 | EVQLLESGGGLVQPGGSLGLSCAASGFTFSGYAMSWVRQAPGKGLNWVSAIDYSGNDTYYAD |
| | | SVKGRFTISRDNSKNTLYLQMNSLRAEDTAVYYCAKESQLLHGLFEHWGQGILVTVSS |
| C33H69 | 26 | QLQLQESGPGLVKPSETLSLTCTVSGGSISSSSYYWGWIRQPPGKGLDWIGSINYSGSTYYNPSL |
| | | KSRVTISVDTSKIQFSLKLRSVTAADTAVYYCARLDGYESPFDYWGQGTLVTVSS |
| C33H70 | 261 | QLQLQESGPGLVKPSETLSLTCTVSGGSIRGSSYYWGWIRQPPGKGLEWIGSIYSSGNTYYNPSL |
| | | KSRVTISVDTSKNQFSLKLSSVTAADTAVYYCARLGSLVVVPAAMSFDYWGQGTLVTVSS |
| C33H72 | 262 | EVQLVESGGGLVQPGGSLRLSCAASGFTFSSYWMSWVRQAPGKGLEWVANIKQHGSEKYYV |
| | | DSVKGRFTISRDNAKNSLYLQMNSLRAEDTAVYYCARDRDLGYFDYWGQGTLVTVSS |
| C33H73 | 263 | EVQLLESGGGLVQPGGSLRLSCAASRFTFSSYAMTWVRQAPGKGLEWVSTINISGGSTYYADS |
| | | VKGRFTISRDNSKNTLYLQMNSLRAEDTAVYYCTKGGYSSGPFDYWGQGTLVSVSS |
| C33H74 | 264 | QVQLVESGGGVVQPGRSLRLSCAASRFTFSSYGMHWVRQAPGKGLEWVAVISYDGSNKYYA |
| | | DSVKGRFTISRDNSKNTLYLQMNSLRAEDTAVHYCAKDFRSFDWLPPDSASYHGMDVWGQG |
| | | TTVTVSS |
| C33H76 | 265 | EVQLLESGGGLVQPGGSLRLSCAASGFTFNYAMSWVRQAPGKGLEWVSAISGSGGSTYYADS |
| | | VKGRFTISRDISKNTLYLQMNSLRAEDTAVYYCARTYNSGYYDGDFDYWGQGTLVTVSS |
| C33H78 | 266 | QVQLVESGGGVVQPGRSLRLSCAASGFTFSSYGMHWVRQAPGKGLEWVAVISYDGSNKYYA |
| | | DSVKGRFTISRDNSKNTLFLQMNSLRAEDTAVYYCAKDFRYFDWLPPDSSSYYGMDVWGQGT |
| | | TVTVSS |
| C33H80 | 267 | QVQLVQSGSELRKPGASVKVSCKASGYTFTNYAMNWVRQAPGQGLEWMGWINTNTGNPTY |
| | | AQGFTGRFVFSLDTSVSSAYLQISSLKAEDTAMYYCATDRDRGTDYWGQGTLVTVSS |
| C33H81 | 268 | QVQLVESGGGVVQPGRSLRLSCAASGFTFSAYGMHWVRQAPGKGLEWVAVISYDGSNKYYA |
| | | DSVKGRFTISRDNSKNTLYLQMNSLRAEGTAVYYCAKDFRSFDWLPPDSASYHGMDVWGQG |
| | | TTVTVSS |
| C33H84 | 269 | QVQLVESGGGVVQPGRSLRLSCAASGFTFSSYGMHWVRQAPGKGLEWVAVISYDGSNKYYA |
| | | DSVKGRFTISRDNSKNTLYLQMNSLRAEDTAVYYCAKDFRSFDWLPPDSTSYYGMDVWGQGT |
| | | TVTVSS |
| C33H87 | 270 | EVQLVESGGGFVQPGGSLRLSCAASGFTFSSYWMSWVRQAPGKGLEWVANIKQHGSEKYYV |
| | | DSVKGRFTISRDNVKNSLYLQMNSLRTEDTAVYYCARDRDLGYFDYWGQGTLVTVSS |
| C33H88 | 271 | QVQLVQSGSELKKPGASVKVSCKASGYTLTRSAMNWVRQAPGQGLEWMGWINTNTGNPTYA |
| | | QGFTGRFVFSLDTSVNTAYLLISSLKTEDTAVYYCASDILPGYHEDYWGQGTLVTVSS |
| C33H90 | 272 | QVQLQQSGPGLVKPSQTLSLTCAISGDSVSSNSAAWNWIRQSPSRGLEWLGRTYYRSKWYND |
| | | YALSVQSRITINPDTSKNQFSLQLNSVTPEDTAVYYCAREVAVAASFDYWGQGTLVTVSS |
| C33H91 | 273 | QLQLQESGPGLVKPSETLSLTCTVSGGSISSRSHYWGWIRQPPGVGLEWIGSIYYTGSTYYNPSL |
| | | KSRVTISVDTSKNQFSLKLSSVTAADTAVYYCARLADIVVVPAARYFDYWGQGTLVTVSS |
| C33H92 | 274 | QLQLQESGPGLVKPSETLSLTCTVSGGSIRSSSYYWGWIRQPPGKGPEWIGSIYSSGNTYYNPSL |
| | | KSRVTISVDTSKNQFSLKLISMTAADTAVFYCARLAATIVVPAARYFDCWGQGTLVTVSS |
| C33H98 | 275 | EVQLVESGGGFVQPGGSLRLSCAASGFTFSSYWMSWVRQAPGKGLEWVANIKQHGSEKYYV |
| | | DSVKGRFTISRDNAKNSLYLQMNSLRAEDTAVYYCARDRDLGYFDYWGQGTLVTVSS |
| C33H99 | 276 | EVQLVESGGGLVQPGGSLRLSCAASGFTFSSYWMTWVRPAPGKGLEWVANIKRDGGEKYYV |
| | | DSVKGRFTISRDNAANSLYLQMNSLRVEDTAVYYCARPFYDHFDYWGQGTLVTVSS |
| C33H108 | 277 | QVQLVQSGSELKKPGASVKVSCKASGYTFSTYAMNWVRQAPGQGLEWMGWINTNTGNPTYA |
| | | QGFTGRFVFSLDTSVSTAYLQISSLKAEDTAVYYCARDRDRGTDYWGQGTLVTVSS |
| C33H249 | 278 | EVQLVESGGGLVQPGRSLRLSCVASGFTFDDYAIHWVRQAPGKGLEWVSGLSWNGGNIGYAD |
| | | SVKGRFTISRDNAKNSLYLQMNSLKTEDTAFYYCTKDTPYGDYFDYWGQGTLVTVSS |
| C33H250 | 279 | EVQLVESGGGLVQPGRSLRLSCAGSGFTFDDYAIHWVRQAPGKGLEWVSGLSWNGGNIGYAD |
| | | SVKGRFTISRDNAKNSLYLQLNSLKTEDTAFYYCAKDSPYGDYFDYWGQGTLVTVSS |
| C33H251 | 280 | EVQLVESGGGLVQPGRSLRLSCAASGFTFDDYAMHWVRQAPGKGLEWVSGIGWSGGSIVYAD |
| | | SVKGRFKISRDNAKNSLYLQMNSLRAEDTALYYCAKDSPYGDFFDYWGQGTLVTVSS |
| C33H252 | 281 | EVQLVESGGGLVQPGRSLRLSCAASGFTFDDYAMHWVRQAPGKGLEWVSGIGWSGGSIVYAD |
| | | SVKGRFTISRDNAKNSLYLQMNSLRAEDTALYYCAKDSPYGDFFDYWGQGTLVTVSS |
| C33H253 | 282 | EVQLLESGGGLVQPGGSLKLSCTASGFTFRSYAMSWVRQAPGKGLEWVSAINGYGDGRYYAD |
| | | SVKGRFTISRDNSKNTLYLQMNSLRAEDTAVYSCAKDQGFGELFFDYWGQGTLVTVSS |
| C33H254 | 283 | QVQLVESGGGVVQPGRSLRLSCAASGFTFSYYGMHWVRQAPDKGLEWVAVIWFDGNNKYY |
| | | ADSVKGRFTISRDNSKNTLYLQMNSLRAEDTAVYYCARDRELLFDYWGQGTLVTVSS |
| C33H255 | 284 | EVQLVESGGGLVQPGRSLRLSCAASGFTFDDYAMHWVRQVPGEGLEWVSGISWNGGDMVYA |
| | | DSVKGRFTISRDNAKNSLYLQMNSLRPEDTALYYCVKDMPYFDFLTGSDYYYYGMDVWGQG |
| | | TTVTVSS |
| C33H256 | 285 | QVQLVESGGGVVQPGRSLRLSCATSGFTFSNYGMHWVRQAPGKGLEWVAVIWYVGSHKYYA |
| | | DSVKGRFTISRDNSKNTLYLQMNSLRAEDTAVYYCARDGSLCFDYWGQGTLVTVSS |
| LC ID | | |
| B23L3 | 286 | DIVMTQSPDSLAVSLGERATINCRASQSVDYNGISYMHWYQQKPGQPPKLLIYAASNPESGVP |
| | | DRFSGSGSGTDFTLTISSLQAEDVAVYYCQQIIEDPWTFGQGTKVEIK |
| CD3L66 | 287 | QTVVTQEPSLTVSPGGTVTLTCRSSTGAVTTSNYANWVQQKPGQAPRGLIGGTNKRAPGTPAR |
| | | FSGSLLGGKAALTLSGVQPEDEAEYYCALWYSNLWVFGGGTKLTVL |
| CD3L150 | 52 | QSALTQPASVSGSPGQSITISCTGTSSNIGTYKFVSWYQQHPDKAPKVLLYEVSKRPSGVSSRFS |
| | | GSKSGNTASLTISGLQAEDQADYHCVSYAGSGTLLFGGGTKLTVL |
| C33L8 | 288 | SYELTQPPSVSVSPGQTASIICSGDKLGNKYACWYQQKPGQSPVLVIYQDSKRPSGIPERFSGSN |
| | | SGNTATLTISGTQAVDEADYYCQAWDSSTYVFGTGTKVTVL |
| C33L10 | 289 | SYVLTQPPSVSVAPGQTARITCGGSNIGSKSVHWYQQKPGQAPVMVVYDDSDRPSGIPERFSGS |
| | | NSGNTATLTISRVEAGDEADYYCQVWDSSSDVVFGGGTKLTVL |
| C33L11 | 290 | SYELTQPPSVSVSPGQTASITCSGHKLGDKYACWYQQKPGQSPVVVIYKDSKRPSGIPERFSGS |
| | | NFGNTATLTISGTQAMDEADYYCQAWDSSTVVFGGGTKLTVL |
| IAPL24 | 291 | SYELTQPPSVSVSPGQTASITCSGDKLGDKYACWYQQKPGQSPVLVIYQDSKRPSGIPERFSGSN |
| | | SGNTATLTISGTQAMDEADYYCQAWDSSTVVFGGGTKLTVL |
| C33L58 | 292 | SYELTQPPSVSVSPGQTASITCSGDKLGDKYACWYQQKPGQSPVLVIYQDYKRPSGIPERFSGS |
| | | NSGNTATLTISGTQAMDEADYYCQAWDSSTYVFGTGTKVTVL |
| C33L59 | 293 | SYELTQPPSVSVSPGQTASITCSGDKLGDKYACWYQQKPGQSPVLVIYQDYKRPSGIPERFSGS |
| | | NSGNTATLTISGTQTMDEADYYCQAWDISTYVFGTGTKVTVL |
| C33L34 | 294 | SYELTQPPSVSVSPGQTASITCSGDKLGDKYACWYQLRPGQSPILVIYQDSNRPSGIPERFSGSNS |
| | | GNTATLTISGTQAMDEADYYCQAWDSSTWVFGGGTKLTVL |
| N46L109 | 295 | SYELTQPPSVSVSPGQTASITCSGDKLGDKYACWYQQKPGQSPVLVIYQDSKRPSGIPERFSGSN |
| | | SGNTATLTISGTQAMDEADYYCQAWDSSTWVFGGGTKLTVL |
| C33L42 | 296 | SYVLTQPPSVSVAPGQTARITCGGNNIGEKSVHWYQQKPGQAPVLVVYDDSDRPPGIPERFSGS |
| | | NSGNTATLTITRVEAGDEADYYCQVWDSSSDHVVFGGGTKLTVL |
| C33L47 | 297 | SYELTQPPSVSVSPGQTASITCSGDKLGDKYACWYQQKPGQSPVVVIYQDRKRPSGIPERFSGS |
| | | NFGNTATLTISGTQAMDEADYYCQAWDSSTVVFGGGTKLTVL |
| C33L60 | 298 | SYELTQPPSVSVSPGQTASITCSGDKLGDKYACWYQQKPGQSPVLVIYQDGKRPSGIPERFSGS |
| | | NFGNKATLTISGTQAMDEADYYCQAWDRNTVVFGGGTKLTVL |
| C33L17 | 299 | DIVMTQSPDSLAVSLGERATINCKSSQSVLYSSNNKNYLAWYQQKAGQPPKLLIYWASTRESG |
| | | VPDRFSGSGSGTDFILIISSLQAEDVAVYYCQQYYGTPWTFGQGTKVEIK |
| C4LL152 | 300 | DIQMTQSPSSVSASVGDRVTITCRASQGISSWLAWYQQKPGKAPKLLIYAASSLQSGVPSRFSG |
| | | SGSGTDFTLTISSLQPEDFATYYCQQANSFPFTFGPGTKVDIK |
| C33L40 | 301 | SYELTQPPSVSVSPGQTASITCSGNKLGAKFASWYQQKPGQSPVLVIYQDNKRPSGIPERFSGSN |
| | | SGNTATLTISGTQAVDEADYYCQAWDSSTVVFGGGTKLTVL |
| C33L32 | 302 | SYELTQPPSVSVSPGQTASITCSGDKLGDKYVRWYQQKTGQSPVLVMYQDSKRPSGIRERFYG |
| | | SNSGNTATPTISGTQAVDEAEYYCQAWDSSTGVVFGGGTKLTVL |
| C33L38 | 303 | SYELTQPPSVSVPPGQTASITCSGDKLGDKYACWYQQKPGQSPVLVIYQDNKRPSGIPERFSGS |
| | | NSGNTATLTISGTQAMDEADYYCQAWGRNTVVFGGGTKLTVL |
| C33L39 | 304 | QSALTQPASVSGSPGQSIPISSTGTSSDDGKNNIVSWYQQHPGKAPKLMIYKDSKRPSGVSNRFS |
| | | GSKSGNTASLTISGLQADDEADYHCCSYAGASNHVVFGGGTKLTVL |
| C33L57 | 305 | SYELTQPPSVSVSPGQTASITCSGDELGNKYACWYQQKPGQSPVVVVYQDRKRPSGIPERFSGS |
| | | NFGNTATLTISGTQAMDEADYYCQAWDSSTVVFGGGTKLTVL |
| C33L73 | 306 | QSALTQPASVSGSPGQSITISCTGTSSDVGDYNYVSWYQQHPGKVPKLMIYDVSNRPSGVSNRF |
| | | SGSMSGNTASLTISGLQAEDEADYYCSSYSSSSALEVFGGGTKLTVL |
| C33L53 | 307 | SYELTQPPSVSVSPGQTASITCSGDKLGDKYACWYQQKPGQSPVLVIYQDNKRPSGIPERFSGS |
| | | NSGNTATLTISGTQAMDEADYYCQAWDSNTVVFGGGTKLTVL |
| C33L66 | 308 | SYELTQPPSVSVSPGQTASITCSGDKLGDKYVCWYQQKPGQSPVVVIHQDRKRPSGIPERFSGS |
| | | NFGNTATLTISGTQAMDEADYYCQAWDSSTVVFGGGTKLTVL |
| C33L35 | 309 | SYELTQPPSVSVSPGQTASITCSGDKLGNKYASWYQQKPGQSPVLVIYQDTKRPSGIPERVSGS |
| | | NSGNTATLTISGTQAMDEADYHCQAWDSSTVVFGGGTKLTVL |
| C33L61 | 310 | QSALTQPASVSGSPGQSITISCTGINSDVGSYDLVSWYQQHPGKAPKLLIYDGSERPSGVFGRFS |
| | | GSKSDNTTSLTISGLQAEDEAAYYCCSYEVTTTYVVFGGGTKLTVL |
| C33L51 | 311 | SYVLTQPPSVSVAPGQTARITCGGNNIGSKSVHWSQQKPGQAPVLVVYDDSDRPSGIPERFSGS |
| | | NSGNTATLTISRVEAGDEADYYCQVWDSNSDHVVFGGGTKLTVL |
| C33L44 | 312 | SYELTQPPSVSVSPGQTASITCSGDKLGDKYACWYQQKPGQSPVLVIYQDSNRPSGIPERFSGSN |
| | | SGNTATLTISETQAMDEADYYCQAWDSSTYVFGTGTKVTVL |
| C33L30 | 313 | SYELTQPPSVSVSPGQTVSISCSGDRLGDKYACWYQQKPGQSPVLVIYQDSKRPSGIPERFSGSN |
| | | SGNTATLTISGTQAMDEADYYCQAWDSSSYVFGTGTKVTVL |
| C33L69 | 314 | SYELTQPPSVSVSPGQTASITCSGDKLGSKFACWYQQKPGQSPVLVIYQDSKRPSGIPERFSGSN |
| | | SGNTATLTISGTQAMDEADYYCQAWDSSTVVFGGGTKLTVL |
| C33L37 | 315 | SYVLTQPPSVAVAPGQTARITCGGSNIGKISVHWYQQKAGQAPVLVVHDDRARPSGIPERLSGS |
| | | NSGTTATLTISRVEVGDEADYYCQVWNSSSVHPVFGGGTKLTVL |
| C33L74 | 316 | QSALTQPASVSGSPGQSITISCTGTSSDVGDDNYVSWYQQHPGKAPKLMIYDVSNRPSGVSNRF |
| | | SGSKSGNTASLTISGLQSEDEADYYCSSYSSSTTLEVFGGGTKLTVL |
| C33L115 | 317 | DIQMTQSPSSVWASVGDRVTITCRASQGISSWLAWYQQQPGKAPNLLIYRSSSLQSGVPSRFSG |
| | | SGSGTDFTLTISSLQPEDFATYYCQQDNSFPYTFGQGTKLEIK |
| C33L116 | 318 | DIQMTQSPSSEWASVGDRVTITCRASQGISSWLAWYQQKPGKAPKLLIYGASSWQSGVPSRFS |
| | | GSGSGTDFTLTISSLQPEDFATYYCQQDNSFPYTFGQGTKLEIK |
| C33L117 | 319 | DIVMTQSPDSLAVSLGERATINCKSSQTVLYSSNNKNYLAWYQQKPGQPPKLLISWASTRKSG |
| | | VPDRFSGSGSGTDFTLTVSSLQAEDVAVYYCQHYYSTPYTFGQGTKLEIK |
| C33L118 | 320 | DIVMTQSPDSLAVSLGERATINCKSSQTVFYSSNNKNYLAWYQQKPGQPPKLLISWASTRKSG |
| | | VPDRFSGSGSGTDFTLTVSSLQAEDVAVYYCQHYYSTPYTFGQGTKLEIK |
| C33L119 | 321 | DIQMTQSPSTLSASVGDRVTITCRASQSISSWLAWYQQKPGKAPKLLIYKASSLESGVPSRFSGS |
| | | GSGTEFTLTISSLQPDDFATYCCQQYNSYPWTFGQGTKVEEK |
| C33L120 | 322 | SYELTQPPSVSVSPGQTASITCSGDELGDMYACWYQQKPGQSPLVVIYQDSKRPSGIPERFSGSN |
| | | SGNTATLTISGTQAMDEAAYYCQTWDTRIAVFGGGTNLTVL |
| C33L 121 | 323 | SYELTQPPSVSVSPGQTASITCSGDNLGNEHVCWYHQKPGQSPVLVIYQNNKRPSGIPERFSGSN |
| | | SGNTATLSISGTQATDEADYYCQAWDSTTAVFGGGTKLTVL |
| C33L122 | 324 | SYELTQPPSVSVSPGQTANISCSGVTLGYNYAYWYQQKPGQSPILVISQDTQRPSGIPERFSGSN |
| | | SGNTATLTISGTQAMDEAAYYCQAWDITTVLFGGGTKLTVL |
| C33L132 | 325 | SYELTQPPSVSVSPGQTASITCSGDKLGDKYASWYQQKPGQSPVLVIYQDGKRPSGIPERFSGSN |
| | | FGNKATLTISGTQAMDEADYYCQAWDRNTVVFGGGTKLTVL |
| C33L41 | 326 | SYELTQPPSVSVSPGQTASITCSGDKLGNKYASWYQQKPGQSPVLVIYQDSKRPSGIPERFSGSN |
| | | SGNTATLTISGTQAMDEADYYCQAWDSSTVVFGGGTKLTVL |

TABLE 44
CD33 mAb Heavy Chain CDR1-3 sequences

| HC ID | CDR1 | ID | CDR2 | ID | CDR3 | ID |
|---|---|---|---|---|---|---|
| B23H1 | GFSLSTSGMG | 327 | IYWDDDK | 368 | ARLYGFTYGFAY | 409 |
| CD3H141 | GFTFNTYA | 328 | IRSKYNN | 369 | ARHGNFGNSYVS | 410 |
| | | | YAT | | WFAY | |
| CD3H219 | GDSVFNNNAA | 329 | TYYRSKWL | 370 | ARGYSSSFDY | 411 |
| | | | Y | | | |
| C33H42 | GGSISSSSHY | 330 | IYYSGNT | 371 | ARLADVVVVPAA | 412 |
| | | | | | RYFDS | |
| C33H44 | GDSVSSNSAA | 331 | TYYRSKWY | 372 | ARETMFRGLMDY | 413 |
| | | | N | | | |
| C33H45 | GFTFSSYG | 332 | ISYDGSNK | 373 | AKDFRSLDWLPP | 414 |
| | | | | | DSTSYDGMDV | |
| C33H46 | GYTFTNYA | 333 | INTNTGNP | 374 | ARDREVRDY | 415 |
| C33H48 | GGSIRSTNYY | 334 | IYYSGNT | 375 | ARLADVVVVPAA | 416 |
| | | | | | RYFDY | |
| C33H49 | GGSIRSSGFY | 335 | IYYSGNT | 376 | ARLADVVVVPAA | 417 |
| | | | | | RYFDN | |
| C33H51 | GGSISTGRYY | 336 | IYYSGNT | 377 | ARLGSLVVVPAA | 418 |
| | | | | | MSFDY | |
| C33H52 | GGSIRGSSYY | 337 | IYSSGNT | 378 | ARLGSLVVVPAA | 419 |
| | | | | | MSFDY | |
| C33H55 | GGSISSSNW | 338 | IYHSGNT | 379 | ARIIAVARYFDS | 420 |
| C33H65 | GFTFSSYG | 339 | ISYDGSNK | 380 | AKDFRDFDWLPP | 421 |
| | | | | | DSTSYHGMDV | |
| C33H66 | GFTFSSYG | 340 | ISYDGSNK | 381 | AKDFRSFDWLPP | 422 |
| | | | | | DSASYHGMDV | |
| C33H68 | GFTFSGYA | 341 | IDYSGNDT | 382 | AKESQLLHGLFE | 423 |
| | | | | | H | |
| C33H69 | GGSISSSSYY | 342 | INYSGST | 383 | ARLDGYESPFDY | 424 |
| C33H70 | GGSIRGSSYY | 343 | IYSSGNT | 384 | ARLGSLVVVPAA | 425 |
| | | | | | MSFDY | |
| C33H72 | GFTFSSYW | 344 | IKQHGSEK | 385 | ARDRDLGYFDY | 426 |
| C33H73 | RFTFSSYA | 345 | INISGGST | 386 | TKGGYSSGPFDY | 427 |
| C33H74 | RFTFSSYG | 346 | ISYDGSNK | 387 | AKDFRSFDWLPP | 428 |
| | | | | | DSASYHGMDV | |
| C33H76 | GFTFNYA | 347 | ISGSGGST | 388 | ARTYNSGYYDGD | 429 |
| | | | | | FDY | |
| C33H78 | GFTFSSYG | 348 | ISYDGSNK | 389 | AKDFRYFDWLPP | 430 |
| | | | | | DSSSYYGMDV | |
| C33H80 | GYTFTNYA | 349 | INTNTGNP | 390 | ATDRDRGTDY | 431 |
| C33H81 | GFTFSAYG | 350 | ISYDGSNK | 391 | AKDFRSFDWLPP | 432 |
| | | | | | DSASYHGMDV | |
| C33H84 | GFTFSSYG | 351 | ISYDGSNK | 392 | AKDFRSFDWLPP | 433 |
| | | | | | DSTSYYGMDV | |
| C33H87 | GFTFSSYW | 352 | IKQHGSEK | 393 | ARDRDLGYFDY | 434 |
| C33H88 | GYTLTRSA | 353 | INTNTGNP | 394 | ASDILPGYHEDY | 435 |
| C33H90 | GDSVSSNSAA | 354 | TYYRSKWY | 395 | AREVAVAASFDY | 436 |
| | | | N | | | |
| C33H91 | GGSISSRSHY | 355 | IYYTGST | 396 | ARLADIVVVPAA | 437 |
| | | | | | RYFDY | |
| C33H92 | GGSIRSSSYY | 356 | IYSSGNT | 397 | ARLAATIVVPAA | 438 |
| | | | | | RYFDC | |
| C33H98 | GFTFSSYW | 357 | IKQHGSEK | 398 | ARDRDLGYFDY | 439 |
| C33H99 | GFTFSSYW | 358 | IKRDGGEK | 399 | ARPFYDHFDY | 440 |
| C33H108 | GYTFSTYA | 359 | INTNTGNP | 400 | ARDRDRGTDY | 441 |
| C33H249 | GFTFDDYA | 360 | LSWNGGNI | 401 | TKDTPYGDYFDY | 442 |
| C33H250 | GFTFDDYA | 361 | LSWNGGNI | 402 | AKDSPYGDYFDY | 443 |
| C33H251 | GFTFDDYA | 362 | IGWSGGSI | 403 | AKDSPYGDFFDY | 444 |
| C33H252 | GFTFDDYA | 363 | IGWSGGSI | 404 | AKDSPYGDFFDY | 445 |
| C33H253 | GFTFRSYA | 364 | INGYGDGR | 405 | AKDQGFGELFFD | 446 |
| | | | | | Y | |
| C33H254 | GFTFSYYG | 365 | IWFDGNNK | 406 | ARDRELLFDY | 447 |
| C33H255 | GFTFDDYA | 366 | ISWNGGDM | 407 | VKDMPYFDFLTG | 448 |
| | | | | | SDYYYYGMDV | |
| C33H256 | GFTFSNYG | 367 | IWYVGSHK | 408 | ARDGSLCFDY | 449 |

TABLE 45
CD3 mAb Light Chain CDR1-3 sequences

| LC ID | CDRI | ID | CDR2 | ID | CDR3 | ID |
|---|---|---|---|---|---|---|
| B23L3 | QSVDYNGISY | 450 | AAS | 492 | QQIIEDPWT | 534 |
| CD3L66 | TGAVTTSNY | 451 | GTN | 493 | ALWYSNLWV | 535 |
| CD3L150 | SSNIGTYKF | 452 | EVS | 494 | VSYAGSGTLL | 536 |
| C33L8 | KLGNKY | 453 | QDS | 495 | QAWDSSTYV | 537 |
| C33L10 | NIGSKS | 454 | DDS | 496 | QVWDSSSDVV | 538 |
| C33L11 | KLGDKY | 455 | KDS | 497 | QAWDSSTVV | 539 |
| IAPL24 | KLGDKY | 456 | QDS | 498 | QAWDSSTVV | 540 |
| C33L58 | KLGDKY | 457 | QDY | 499 | QAWDSSTYV | 541 |
| C33L59 | KLGDKY | 458 | QDY | 500 | QAWDISTYV | 542 |
| C33L34 | KLGDKY | 459 | QDS | 501 | QAWDSSTWV | 543 |
| N46L109 | KLGDKY | 460 | QDS | 502 | QAWDSSTWV | 544 |
| C33L42 | NIGIKS | 461 | DDS | 503 | QVWDSSSDHVV | 545 |
| C33L47 | KLGDKY | 462 | QDR | 504 | QAWDSSTVV | 546 |
| C33L60 | KLGDKY | 463 | QDG | 505 | QAWDRNTVV | 547 |
| C33L17 | QSVLYSSNNKNY | 464 | WAS | 506 | QQYYGTPWT | 548 |
| C4LL152 | QGISSW | 465 | AAS | 507 | QQANSFPFT | 549 |
| C33L40 | KLGAKF | 466 | QDN | 508 | QAWDSSTVV | 550 |
| C33L32 | KLGDKY | 467 | QDS | 509 | QAWDSSTGVV | 551 |
| C33L38 | KLGDKY | 468 | QDN | 510 | QAWGRNTVV | 552 |
| C33L39 | SSDDGKNNI | 469 | KDS | 511 | CSYAGASNHVV | 553 |
| C33L57 | ELGNKY | 470 | QDR | 512 | QAWDSSTVV | 554 |
| C33L73 | SSDVGDYNY | 471 | DVS | 513 | SSYSSSSALEV | 555 |
| C33L53 | KLGDKY | 472 | QDN | 514 | QAWDSNTVV | 556 |
| C33L66 | KLGDKY | 473 | QDR | 515 | QAWDSSTVV | 557 |
| C33L35 | KLGNKY | 474 | QDT | 516 | QAWDSSTVV | 558 |
| C33L61 | NSDVGSYDL | 475 | DGS | 517 | CSYEVTTTYVV | 559 |
| C33L51 | NIGSKS | 476 | DDS | 518 | QVWDSNSDHVV | 560 |
| C33L44 | KLGDKY | 477 | QDS | 519 | QAWDSSTYV | 561 |
| C33L30 | RLGDKY | 478 | QDS | 520 | QAWDSSSYV | 562 |
| C33L69 | KLGSKF | 479 | QDS | 521 | QAWDSSTVV | 563 |
| C33L37 | NIGKIS | 480 | DDR | 522 | QVWNSSSVHPV | 564 |
| C33L74 | SSDVGDDNY | 481 | DVS | 523 | SSYSSSTTLEV | 565 |
| C33L115 | QGISSW | 482 | RSS | 524 | QQDNSFPYT | 566 |
| C33L116 | QGISSW | 483 | GAS | 525 | QQDNSFPYT | 567 |
| C33L117 | QTVLYSSNNKNY | 484 | WAS | 526 | QHYYSTPYT | 568 |
| C33L118 | QTVFYSSNNKNY | 485 | WAS | 527 | QHYYSTPYT | 569 |
| C33L119 | QSISSW | 486 | KAS | 528 | QQYNSYPWT | 570 |
| C33L 120 | ELGDMY | 487 | QDS | 529 | QTWDTRIAV | 571 |
| C33L121 | NLGNEH | 488 | QNN | 530 | QAWDSTTAV | 572 |
| C33L122 | TLGYNY | 489 | QDT | 531 | QAWDITTVL | 573 |
| C33L132 | KLGDKY | 490 | QDG | 532 | QAWDRNTVV | 574 |
| C33L41 | KLGNKY | 491 | QDS | 533 | QAWDSSTVV | 634 |

[0808] 5-5 Characterization of Anti-CD33 mAbs

[0809] OMNIRat antibodies identified via immunization, v-region cloned and subsequently expressed and purified were characterized further for binding to CD33 expressing cells and binding to recombinant antigens. The purified antibodies were assessed for binding to stably transfected HEK293F cells expressing human CD33 or cyno CD33 (generation described above) along with the parental HEK293F as negative control. Cells were harvested from tissue culture flasks using non-enzymatic dissociation buffer (Thermo Scientific). The flasks were rinsed twice with PBS and dissociation buffer was added to the flask, and the flask was incubated for 10 minutes at 37° C. until the cells became non-adherent. The cells were centrifuged at 300 g for 5 minutes and resuspended at 1.0×10⁶ cells/ml in staining buffer (Becton Dickinson; Franklin Lakes, N.J.). 50,000 cells/well of each cell type was plated in 50 μl of staining buffer in round bottom plates (Becton Dickinson). 50 μl of 2× concentration test mAb or isotype control was added at 3 dilutions and zero (120 nM, 12 nM, and 1.2 nM and 0 nM), and the resultant solution was incubated 30 min at 4° C. 100 μl staining buffer was added to all wells of each plate, the plates were spun at 300 g for 5 min, the buffer was removed, 200 μl staining buffer was added to all wells of each plate, the plates were spun at 300 g for 5 min, and the buffer was removed. 50 μl of 2 μg/ml of Goat-anti-human Fc AF647 secondary antibody (Jackson Immunoresearch; West Grove, Pa.) was added to all wells of the plates, and the plates were incubated for 30 min at 4° C. 100 μl staining buffer was added to all wells of the plates, the plates were spun at 300 g for 5 min, and the buffer was removed. 200 μl running buffer (running buffer is Staining buffer, 1 mM EDTA, 0.1% Pluronic Acid) was added to all wells of the plates, the plates were spun at 300 g for 5 min, and the buffer was removed. 30 μl running buffer containing Sytox Green live/dead dye (ThermoFisher) was added to all wells with cells and the plates were read on an iQue IntelliCyt flow cytometer. Cells were gated on forward vs. side scatter to eliminate debris, then on singlets and then on live cells which excluded the Sytox stain. Antibody binding was assessed by the mean fluorescence intensity in the AF647 channel.

[0810] To begin assessing the biophysical binding properties of the purified mAbs an off-rate screen was performed. 76 OMNIRat anti-CD33 mAbs were tested for binding to recombinant human CD33 ECD-HSA (C33W2) and cyno CD33 ECD-HSA (C33W1) proteins (Janssen production) and the off-rate was measured by IBIS MX96 SPRi array platform (Carterra; Newton, Pa.). Goat anti-human Fc IgG (Jackson Immunoresearch, Cat #109-005-098) was directly immobilized via amine coupling at 100 μg/mL in acetate buffer, pH 4.5 using a CMD50m sensor chip (Xantec, lot CMD50m0415.a) with an association time of 10 minutes in the IBIS instrument. An average GAH-Fc immobilization level of ˜9000 Rus was achieved. The sensor chip was transferred to the Continuous Flow Microspotter (CFM) unit to capture each anti-CD33 mAb at 10 μg/ml for 10 minutes. Binding was measured on IBIS SPRi by single cycle kinetics without regeneration. Each antigen concentration series (3 μM in 3 fold dilution series) was sequentially injected from low (0.46 nM) to high concentrations (3 μM) to bind to captured mAbs with an association time of 5 minutes and dissociation time of 15 minutes using PBST (PBS with 0.005% Tween) as running buffer. The raw binding data (.trix file format) were referenced and aligned using SprintX software (Wasatch, Ver 1.9.3.2), then exported (.ibmx file format) to Scrubber software (Ver. 2.0) for 1:1 binding kinetic analyses (Wasatch, version 2.0.0.33) to extract the k_{off} results.

[0811] Table 46 below summarizes the top 32 clones as assessed by binding to human and cyno CD33 expressing cell lines as well as towards recombinant antigen (off-rate of at least >10e-3 for one of the antigens). Of these 32, all but 4 showed appreciable binding to either human or cyno expressing cells. All 32 were carried for further characterization via epitope binning and full kinetic analysis.

TABLE 46
Cell Binding and Off-Rate analysis of the anti-CD33 antibodies derived from OMNIRat

| Prot. AA ID | % Mon | 60 nM CD33 | 6 nM CD33 | 0.6 nM CD33 | 0 nM CD33 | K_{D} |
|---|---|---|---|---|---|---|
| C33B48 | 91.96 | 400995.84 | 428948.75 | 391157.69 | 91.12 | 5.47E−05 |
| C33B73 | 100.00 | 201493.02 | 33443.28 | 4034.64 | 93.98 | 9.12E−05 |
| C33B125 | 98.48 | 258779.13 | 79728.78 | 9203.75 | 78.26 | 1.54E−04 |
| C33B55 | 96.39 | 188278.42 | 59155.10 | 7625.56 | 105.39 | 2.15E−04 |
| C33B96 | 98.75 | 476040.28 | 475653.41 | 187925.80 | 55.23 | 2.28E−04 |
| C33B124 | 100.00 | 798.33 | 126.37 | 90.26 | 172.03 | 2.38E−04 |
| C33B72 | 96.94 | 328194.72 | 105474.59 | 12506.85 | 93.32 | 2.84E−04 |
| C33B79 | 100.00 | 236644.03 | 41925.89 | 4988.81 | 77.78 | 3.28E−04 |
| C33B77 | 92.11 | 241787.16 | 88691.05 | 11484.97 | 69.46 | 3.37E−04 |
| C33B82 | 96.21 | 188508.56 | 41264.92 | 5033.60 | 73.44 | 3.41E−04 |
| C33B87 | 100.00 | 242185.48 | 79532.87 | 12547.05 | 73.65 | 3.52E−04 |
| C33B80 | 98.33 | 5799.64 | 409.97 | 114.93 | 88.88 | 3.84E−04 |
| C33B101 | 96.91 | 268805.28 | 204984.16 | 35513.63 | 70.07 | 3.98E−04 |
| C33B83 | 98.07 | 92956.55 | 7856.70 | 1020.48 | 87.37 | 4.61E−04 |
| C33B46 | 95.81 | 509865.97 | 447627.97 | 418017.22 | 134.53 | 4.67E−04 |
| C33B94 | 98.31 | 200142.00 | 93852.22 | 13274.87 | 89.59 | 5.38E−04 |
| C33B88 | 98.36 | 393148.13 | 481100.91 | 274293.53 | 94.81 | 8.25E−04 |
| C33B66 | 98.71 | 444680.31 | 313288.41 | 56628.04 | 129.73 | 8.59E−04 |
| C33B120 | 97.63 | 190036.14 | 60357.11 | 7054.28 | 92.94 | 1.40E−03 |
| C33B64 | 98.13 | 200158.36 | 54138.77 | 7556.04 | 114.85 | 1.71E−03 |
| C33B52 | 96.76 | 196557.09 | 46286.13 | 6751.01 | 82.46 | 3.13E−03 |
| C33B56 | 95.59 | 143.73 | 79.73 | 111.95 | 138.04 | 4.02E−03 |
| C33B75 | 98.68 | 163795.25 | 29603.57 | 4517.81 | 95.94 | 4.16E−03 |
| C33B107 | 96.90 | 375388.25 | 339798.53 | 161369.64 | 86.54 | 4.44E−03 |
| C33B63 | 98.79 | 247758.77 | 62221.71 | 9671.48 | 86.34 | 4.57E−03 |
| C33B95 | 97.77 | 154556.58 | 44354.07 | 6402.00 | 87.38 | 5.99E−03 |
| C33B61 | 98.87 | 198777.34 | 38699.10 | 5308.45 | 79.84 | 6.71E−03 |
| C33B89 | 100.00 | 315.38 | 119.12 | 65.61 | 70.94 | 8.11E−03 |
| C33B122 | 98.49 | 259183.69 | 84281.03 | 14291.17 | 65.01 | 8.74E−03 |
| C33B62 | 99.05 | 157786.36 | 37359.44 | 6092.03 | 75.00 | 1.00E−02 |
| C33B123 | 95.08 | 224078.95 | 88155.99 | 8864.39 | 71.05 | 1.03E−02 |
| C33B54 | 100.00 | 147753.30 | 27461.06 | 3766.69 | 61.26 | 2.48E−02 |

| Prot. AA | 60 nM Cyno | 6 nM Cyno | 0.6 nM Cyno | 0 nM Cyno | Cyno CD33 |
|---|---|---|---|---|---|
| ID | CD33 | CD33 | CD33 | CD33 | binding K_{D} |
| C33B48 | 56491.32 | 47326.85 | 43351.12 | 94.01 | 1.20E−04 |
| C33B73 | 14799.14 | 6987.92 | 795.57 | 72.51 | 4.08E−04 |
| C33B125 | 15603.45 | 11526.47 | 3458.27 | 70.22 | 3.51E−04 |
| C33B55 | 16020.78 | 9994.42 | 2433.94 | 69.38 | 1.16E−04 |
| C33B96 | 37273.19 | 20087.29 | 11574.59 | 86.31 | 8.19E−04 |
| C33B124 | 593.00 | 132.19 | 77.26 | 98.41 | 4.77E−04 |
| C33B72 | 19422.07 | 13975.14 | 3894.84 | 90.81 | 7.63E−04 |
| C33B79 | 15538.97 | 6427.73 | 1082.85 | 63.59 | 6.82E−03 |
| C33B77 | 17516.20 | 11665.49 | 3601.76 | 85.23 | 4.18E−04 |
| C33B82 | 14269.38 | 6622.07 | 1540.09 | 84.24 | 6.70E−04 |
| C33B87 | 19597.18 | 12652.44 | 3266.36 | 103.07 | 2.28E−04 |
| C33B80 | 4612.58 | 248.60 | 108.93 | 82.38 | 2.66E−04 |
| C33B101 | 48016.75 | 46115.96 | 17989.37 | 79.69 | 1.06E−04 |
| C33B83 | 5304.40 | 687.44 | 159.37 | 87.35 | 2.17E−03 |
| C33B46 | 49840.14 | 49816.36 | 49729.78 | 92.05 | 1.48E−04 |
| C33B94 | 16126.84 | 10782.54 | 3183.70 | 87.82 | 5.37E−04 |
| C33B88 | 50388.18 | 43928.95 | 43940.23 | 90.13 | 3.89E−04 |
| C33B66 | 48905.04 | 49076.39 | 42160.22 | 77.96 | 9.33E−05 |
| C33B120 | 13211.32 | 7865.37 | 2726.18 | 75.77 | 8.54E−04 |
| C33B64 | 21109.59 | 9685.04 | 3102.56 | 99.82 | 1.21E−03 |
| C33B52 | 12582.90 | 8444.39 | 2063.44 | 75.24 | 1.20E−03 |
| C33B56 | 104.27 | 85.94 | 78.56 | 83.31 | 8.46E−04 |
| C33B75 | 12194.41 | 5577.80 | 1709.40 | 124.32 | 1.20E−03 |
| C33B107 | 50325.07 | 47810.05 | 36786.69 | 55.11 | 1.35E−04 |
| C33B63 | 18322.71 | 11642.38 | 2879.89 | 87.94 | 9.47E−04 |
| C33B95 | 14774.34 | 9594.12 | 1637.99 | 80.81 | 6.98E−03 |
| C33B61 | 13552.71 | 8211.09 | 1595.90 | 106.84 | 1.83E−03 |
| C33B89 | 47301.14 | 34193.78 | 23334.20 | 112.80 | 4.65E−05 |
| C33B122 | 19740.29 | 13907.32 | 5838.25 | 82.53 | 1.45E−03 |
| C33B62 | 12737.71 | 5620.17 | 1922.97 | 934.44 | 1.32E−03 |
| C33B123 | 10665.93 | 10404.03 | 3232.18 | 61.08 | 2.74E−03 |
| C33B54 | 50466.68 | 43011.75 | 38091.89 | 28785.80 | 1.35E−04 |

[0812] The panel of mAbs was then further characterized for full affinity analysis as well as epitope binning. The binding of anti-CD33 mAbs to recombinant human CD33 ECD-HSA (C33W2) and cyno CD33 ECD-HSA (C33W1) was measured by ProteOn SPR (Bio-Rad). Goat anti-human Fc IgG (Jackson Immunoresearch, Cat #109-005-098) was directly immobilized via amine coupling at 30 μg/mL in acetate buffer, pH 5.0 on all 6 ligand channels in vertical orientation on a GLC Sensor Chip (Bio-Rad, catalog no. 176-5011) with a flow rate of 30 L/min in PBS containing 0.005% Tween-20. The immobilization densities averaged about 5000 Response Units (RU) with less than 5% variation among different channels. Different mAbs were captured on the anti-human Fc IgG surface at 0.25 or 0.5 μg/ml (160˜300 RU) in vertical ligand orientation, with the 6^{th} ligand channel as no ligand surface control. Human and cyno CD33-HSA proteins at 0.3 μM concentration in 3-fold dilution series of 5 concentrations flew in as analyte to bind to captured mAbs in the horizontal orientation. A buffer sample was also injected in the 6^{th} channel to monitor the dissociation of captured mAb and baseline stability. The dissociation phase for all concentrations of human and cyno CD33-HSA was monitored at a flow rate of 100 μL/min for 15 minutes for binding to C33B782, 60 minutes for binding to C33B912 (identical to C33B904 with hIgG4), followed by regeneration using an 18 second pulse of 0.85% phosphoric acid to remove the antigen and the bound mAb. The raw biding data were processed by double referencing after subtracting the response data from: 1) the inter-spot to correct for the non-specific interactions between the Ag and the empty chip surface; 2) the buffer channel to correct for baseline drifting due to the dissociation of captured mAb surface over time. The processed data at all antigen concentrations for each mAb were globally fit to a 1:1 simple Langmuir binding model to extract estimates of the kinetic (kₒₙ, k_{off}) and affinity (K_{d}) constants.

[0813] To determine whether the panel of mAbs all bind 1 distinct epitope or if there was broad epitope coverage, an epitope binning experiment was performed. Competitive epitope binning of CD33 mAbs was performed on an IBIS SPRi instrument (Carterra) using a CMD-200M sensor prism chip. Each anti-CD33 antibody was directly immobilized via amine coupling on the chip at 10 μg/ml in acetate buffer (pH 4.5) using a separate Continuous Flow Microspotter (CFM). Printed sensor chip was then transferred to the IBIS instrument for the binning analyses using a Classical or “Sandwich” binning format. Binning was performed by sequential injection of human CD33 ECD-HSA, (C33W2) at 50 nM followed by a single anti-CD33 mAb injection as competing analyte in solution at 133 nM to bind immobilized anti-CD33 mAbs with surface regeneration after each sequential injection cycle of antigen and antibody.

[0814] To monitor the activity of the immobilized mAbs before and after regeneration, a buffer injection without any competing mAb was performed at the beginning and at the end of the experiment to measure the antigen alone binding activity. The response of competing mAb binding relative to the buffer (antigen alone) binding is an indication whether the antibody in solution blocks or sandwiches the antigen binding to the immobilized mAbs. The raw binning data (.trix file format) were referenced and zeroed using SprintX software (Wasatch, Ver 1.9.3.2), then exported (.ibmx file format) to the binning software HtTools.exe (Wasatch, version 2.0.0.33) for analyses. Data were curated by removing antibodies with antigen responses below 20 RU, and antibodies that did not self-block. Competing mAb responses were normalized relative to the antigen alone binding response. Antibodies with normalized responses <0.25 were denoted blockers, those with normalized responses ≥0.25 were denoted as non-blockers/Sandwichers. Different bins were predicted using a cut at height 2.5 on the combined dendrogram plot.

[0815] The table below summarizes the full kinetic analysis and epitope binning of 32 select mAbs. There are a total of 8 anti-CD33 mAbs that have sub-nanomolar affinity for both human and cyno CD33 and these mAbs correspond to 3 distinct epitope bins while the larger panel has a range of affinities and 7 distinct epitope bins.

TABLE 47
Full Kinetics Analysis and Epitope Binning of OMNIRat derived mAbs
Human CD33 ECD-HSA

| | | | | | Epitope |
|---|---|---|---|---|---|
| Prot. AA ID | V Region ID | ka (1/Ms) | k_{d} (1/s) | K_{D} (M) | Bin |
| C33B48 | C33F53 | 1.62E+06 | 1.82E−05 | 1.12E−11 | 1 |
| C33B46 | C33F51 | 1.45E+06 | 1.99E−03 | 1.38E−09 | 1 |
| C33B66 | C33F71 | 3.85E+04 | 2.03E−03 | 5.29E−08 | 1 |
| C33B107 | C33F112 | binding/no fit | binding/no fit | binding/no fit | 1 |
| C33B88 | C33F93 | binding/no fit | binding/no fit | binding/no fit | 1 |
| C33B96 | C33F101 | 2.26E+05 | 4.36E−04 | 1.92E−09 | 3 |
| C33B101 | C33F106 | 1.62E+05 | 1.08E−03 | 6.64E−09 | 3 |
| C33B73 | C33F78 | 5.59E+05 | 5.59E−05 | 1.00E−10 | 4 |
| C33B125 | C33F130 | 9.92E+05 | 1.34E−04 | 1.40E−10 | 4 |
| C33B55 | C33F60 | 9.85E+05 | 2.53E−04 | 2.60E−10 | 4 |
| C33B82 | C33F87 | 4.45E+05 | 2.70E−04 | 6.10E−10 | 4 |
| C33B83 | C33F88 | 2.70E+05 | 5.21E−04 | 1.93E−09 | 4 |
| C33B75 | C33F80 | 3.85E+05 | 4.41E−03 | 1.14E−08 | 4 |
| C33B123 | C33F128 | 1.02E+06 | 1.52E−02 | 1.48E−08 | 4 |
| C33B52 | C33F57 | 2.06E+05 | 3.96E−03 | 1.92E−08 | 4 |
| C33B61 | C33F66 | 4.89E+05 | 1.05E−02 | 2.14E−08 | 4 |
| C33B62 | C33F67 | 5.07E+05 | 1.26E−02 | 2.49E−08 | 4 |
| C33B64 | C33F69 | 4.33E+05 | 2.21E−03 | 5.10E−09 | 4 |
| C33B63 | C33F68 | 5.33E+05 | 3.74E−03 | 7.01E−09 | 4 |
| C33B122 | C33F127 | 7.47E+05 | 7.12E−03 | 9.53E−09 | 4 |
| C33B72 | C33F77 | 8.71E+05 | 2.00E−04 | 2.30E−10 | 5 |
| C33B79 | C33F84 | 5.15E+05 | 3.90E−04 | 7.60E−10 | 5 |
| C33B77 | C33F82 | 8.28E+05 | 2.62E−04 | 3.20E−10 | 6 |
| C33B87 | C33F92 | 7.20E+05 | 4.32E−04 | 6.00E−10 | 6 |
| C33B94 | C33F99 | 9.22E+05 | 5.85E−04 | 6.30E−10 | 6 |
| C33B95 | C33F100 | 4.82E+05 | 7.40E−03 | 1.54E−08 | 6 |
| C33B120 | C33F125 | 5.75E+05 | 1.68E−03 | 2.93E−09 | 6 |
| C33B89 | C33F94 | low binding | low binding | low binding | 8 |
| C33B54 | C33F59 | low binding | low binding | low binding | 9 |
| C33B124 | C33F129 | 3.57E+05 | 1.24E−04 | 3.50E−10 | NB |
| C33B80 | C33F85 | 3.23E+05 | 4.25E−04 | 1.32E−09 | NB |
| C33B56 | C33F61 | low binding | low binding | low binding | NB |

Cyno CD33 ECD-HSA

| | | | | | Epitope |
|---|---|---|---|---|---|
| Prot. AA ID | V Region ID | ka (1/Ms) | k_{d} (1/s) | K_{D} (M) | Bin |
| C33B48 | C33F53 | 4.31E+06 | 1.58E−04 | 3.66E−11 | 1 |
| C33B46 | C33F51 | 2.97E+06 | 3.75E−04 | 1.26E−10 | 1 |
| C33B66 | C33F71 | 1.22E+06 | 2.66E−04 | 2.17E−10 | 1 |
| C33B107 | C33F112 | 3.31E+05 | 7.01E−05 | 2.12E−10 | 1 |
| C33B88 | C33F93 | binding/no fit | binding/no fit | binding/no fit | 1 |
| C33B96 | C33F101 | binding/no fit | binding/no fit | binding/no fit | 3 |
| C33B101 | C33F106 | 2.25E+05 | 2.69E−04 | 1.20E−09 | 3 |
| C33B73 | C33F78 | 6.00E+05 | 5.08E−04 | 8.46E−10 | 4 |
| C33B125 | C33F130 | 1.12E+06 | 3.39E−04 | 3.04E−10 | 4 |
| C33B55 | C33F60 | 1.16E+06 | 8.37E−05 | 7.23E−11 | 4 |
| C33B82 | C33F87 | 5.45E+05 | 7.51E−04 | 1.38E−09 | 4 |
| C33B83 | C33F88 | 2.47E+05 | 2.88E−03 | 1.17E−08 | 4 |
| C33B75 | C33F80 | 6.16E+05 | 1.32E−03 | 2.15E−09 | 4 |
| C33B123 | C33F128 | 1.26E+06 | 3.39E−03 | 2.69E−09 | 4 |
| C33B52 | C33F57 | 3.13E+05 | 1.48E−03 | 4.74E−09 | 4 |
| C33B61 | C33F66 | 7.34E+05 | 1.62E−03 | 2.21E−09 | 4 |
| C33B62 | C33F67 | 8.05E+05 | 1.49E−03 | 1.85E−09 | 4 |
| C33B64 | C33F69 | 5.90E+05 | 1.01E−03 | 1.71E−09 | 4 |
| C33B63 | C33F68 | 7.23E+05 | 8.80E−04 | 1.22E−09 | 4 |
| C33B122 | C33F127 | binding/no fit | binding/no fit | binding/no fit | 4 |
| C33B72 | C33F77 | 9.19E+05 | 5.40E−04 | 5.87E−10 | 5 |
| C33B79 | C33F84 | 5.48E+05 | 2.20E−03 | 4.01E−09 | 5 |
| C33B77 | C33F82 | 1.08E+06 | 2.66E−04 | 2.47E−10 | 6 |
| C33B87 | C33F92 | 1.12E+06 | 2.64E−04 | 2.36E−10 | 6 |
| C33B94 | C33F99 | 1.10E+06 | 5.20E−04 | 4.73E−10 | 6 |
| C33B95 | C33F100 | 8.44E+05 | 8.06E−03 | 9.56E−09 | 6 |
| C33B120 | C33F125 | 8.76E+05 | 9.02E−04 | 1.03E−09 | 6 |
| C33B89 | C33F94 | 2.65E+05 | 2.01E−04 | 7.60E−10 | 8 |
| C33B54 | C33F59 | 1.32E+06 | 6.37E−04 | 4.84E−10 | 9 |
| C33B124 | C33F129 | 4.67E+05 | 4.72E−04 | 1.01E−09 | NB |
| C33B80 | C33F85 | 4.92E+05 | 2.59E−04 | 5.27E−10 | NB |
| C33B56 | C33F61 | low binding | low binding | low binding | NB |

[0816] The OmniMouse panel (8 mAbs total) was generated separately and characterized further for binding to cells. Cell binding was performed as described above and summarized in the table below. Of the 8 mAbs tested 6 bound directly to CD33 expressing cells while 2 did not.

TABLE 48
Cell Binding of OMNIMouse derived mAbs to human and cyno expressing cell lines

| | Parental | | | | Human CD33 | | | |
|---|---|---|---|---|---|---|---|---|
| mAb | 60 nM | 6 nM | 0.6 nM | 0 nM | 60 nM | 6 nM | 0.6 nM | 0 nM |
| C33B909 | 253.50 | 206.04 | 169.77 | 119.51 | 176.49 | 170.25 | 154.00 | 191.28 |
| C33B910 | 193.52 | 176.14 | 108.46 | 190.17 | 213.55 | 183.33 | 151.25 | 155.29 |
| C33B911 | 1466.02 | 389.41 | 186.22 | 113.30 | 237954.27 | 100333.48 | 13501.02 | 114.07 |
| C33B912 | 977.91 | 273.07 | 140.62 | 124.53 | 237140.86 | 101295.70 | 15726.96 | 149.54 |
| C33B913 | 174.49 | 118.08 | 123.26 | 129.07 | 518952.00 | 409071.06 | 204694.14 | 127.82 |
| C33B914 | 181.37 | 142.74 | 139.10 | 113.48 | 304350.88 | 315129.56 | 153252.58 | 185.45 |
| C33B915 | 101.28 | 147.65 | 143.51 | 100.00 | 390477.25 | 362902.66 | 138398.56 | 112.22 |
| C33B916 | 416.08 | 145.16 | 115.70 | 91.75 | 447815.47 | 404033.19 | 192941.55 | 167.07 |

Cyno CD33

| mAb | 60 nM | 6 nM | 0.6 nM | 0 nM |
|---|---|---|---|---|
| C33B909 | 180.33 | 135.33 | 115.73 | 124.03 |
| C33B910 | 202.42 | 135.18 | 116.71 | 175.97 |
| C33B911 | 17036.56 | 7729.14 | 1935.16 | 97.94 |
| C33B912 | 15070.88 | 7271.38 | 1726.03 | 124.69 |
| C33B913 | 40661.90 | 36920.95 | 35224.10 | 106.19 |
| C33B914 | 44964.85 | 33368.26 | 22086.01 | 86.76 |
| C33B915 | 37495.34 | 35692.21 | 36165.59 | 113.92 |
| C33B916 | 41004.43 | 33294.78 | 22790.61 | 104.43 |

[0817] The 6 mAbs that bound CD33 on cells were further characterized biophysically via full kinetic analysis to recombinant antigen using the methods described above and summarized in the table below. Of the 6 mAbs tested, 1 bound to human CD33 with a picomolar affinity (C33B912) and subnamolar for cyno CD33, while 1 had very strong affinity for human CD33 but only nanomolar affinity towards cyno CD33 (C33B911). Two more clones were subnanomolar for both human and cyno CD33 (C33B913 and C33B916), but neither affinity was in the range of C33B912.

TABLE 49
Full Kinetics Analysis of OMNIMouse derived mAbs

| | Human CD33 ECD-HSA | | | Cyno CD33 ECD-HSA | | |
|---|---|---|---|---|---|---|
| mAb | kₐ (1/Ms) | k_{d} (1/s) | K_{D} (M) | kₐ (1/Ms) | k_{d} (1/s) | K_{D} (M) |
| C33B911 | 1.10E+06 | 4.14E−05 | 3.78E−11 | 1.15E+06 | 1.15E−03 | 1.00E−09 |
| C33B912 | 1.42E+06 | 4.29E−05 | 3.02E−11 | 1.50E+06 | 6.50E−04 | 4.33E−10 |
| C33B913 | 6.60E+05 | 6.40E−04 | 9.69E−10 | 2.56E+06 | 3.08E−04 | 1.20E−10 |
| C33B914 | 4.44E+05 | 9.80E−03 | 2.21E−08 | 5.29E+05 | 2.33E−04 | 4.40E−10 |
| C33B915 | 2.18E+05 | 9.89E−04 | 4.53E−09 | 3.81E+06 | 8.93E−05 | 2.34E−11 |
| C33B916 | 6.27E+05 | 4.11E−04 | 6.55E−10 | 4.73E+05 | 4.03E−04 | 8.52E−10 |

[0818] An epitope binning experiment was performed on the 6 cell binding mAbs derived from OMNIMouse along with several control mAbs previously identified in the earlier OMNIRat campaign. The control mAbs were chosen based on their subnanomolar affinity towards human CD33 and the number of distinct epitope bins. The binning software HtTools assigns Epitope Bin numbers on a per experiment basis and therefore having several controls to already defined epitope bins was critical for cross-comparison. The two OMNIMouse derived human CD33 high affinity clones (C33B911 and C33B912) both binned with clones from bin 4 above (bin 4 in this experiment) while the subnanomolar clone (C33B916) binned into 2 here along with C33B836 (bin 1 in the above experiment).

TABLE 50
Epitope Bins of OMNIMouse anti-CD33 mAbs

| mAb | V region ID | Epitope Bin |
|---|---|---|
| C33B915 | C33F553 | 1 |
| C33B916 | C33F554 | 2 |
| C33B836 | C33F53 | 2 |
| C33B914 | C33F552 | 2 |
| C33B913 | C33F551 | 3 |
| C33B806 | C33F106 | 3 |
| C33B911 | C33F549 | 4 |
| C33B912 | C33F550 | 4 |
| C33B778 | C33F78 | 4 |
| C33B830 | C33F130 | 4 |
| C33B782 | C33F82 | 5 |
| C33B792 | C33F92 | 5 |
| C33B799 | C33F99 | 5 |
| C33B760 | C33F60 | 6 |
| C33B777 | C33F77 | 7 |

[0819] CD33 is comprised of 2 IgG domains, the membrane distal V domain and the membrane proximal C2 domain. The SNP rs12459419 can cause the selective alternative splicing of the CD33 pre-mRNA transcript to yield a C2 only form expressed on cells and therefore targeting this domain can provide clinical benefit. To ascertain which of the two domains, the mAbs were capable of binding, an off-rate screen was performed following the protocol above on 6 mAbs with the highest binding capability that covered 4 distinct epitope bins using Human CD33 ECD-HSA, Human CD33 V-HSA and Human CD33 C2-HSA as the binding antigens. As shown in the table below, the two clones previously grouped in bin 4 both bound to the huCD33 C2 domain but not the huCD33 V domain, while the clones in bin 2 and 3 bound the V domain but not the C2 domain. Two clones grouped into bin 5 did not bind either domain, and, therefore, their exact binding location could span the two domains. Three (3) commercially available mAbs were included in this experiment ((WM53 (EMD Millipore; Darmstadt, Germany), P67.7 (Biolegend, San Diego, Calif.), and LSBio clone 906 (LifeSpan Biosciences, Seattle, Wash.))) and all showed binding to the V domain, but not the C2 domain. Looking at the epitope bins in Tables 42 and 45 in relation to the C2 domain binding data in Table 51, there are a total of 15 mAbs that could potentially bind the C2 domain ranging in affinities from ˜25 nM to ˜30 pM on the human full length protein.

TABLE 51
Off-rate Domain Binding

| | huCD33 ECD- | huCD33-V- | huCD33-C2- | |
|---|---|---|---|---|
| Protein | HSA | HSA | HSA | Epitope |
| ID | k_{d} (1/s) | k_{d} (1/s) | k_{d} (1/s) | Bin |
| C33B912 | 1.29E−05 | No/low binding | 6.68E−05 | 4 |
| | | response | | |
| C33B778 | 4.72E−05 | No/low binding | 2.57E−03 | 4 |
| | | response | | |
| C33B782 | 2.58E−04 | No/low binding | No/low binding | 5 |
| | | response | response | |
| C33B792 | 4.27E−04 | No/low binding | No/low binding | 5 |
| | | response | response | |
| C33B836 | 5.52E−05 | 3.71E−05 | No/low binding | 2 |
| | | | response | |
| C33B806 | 1.36E−03 | 3.18E−03 | No/low binding | 3 |
| | | | response | |
| WM53 | 2.37E−03 | 3.78E−02 | No/low binding | |
| | | | response | |
| P67.7 | 1.05E−03 | 2.43E−03 | No/low binding | |
| | | | response | |
| LSBio | 2.45E−03 | 4.34E−02 | No/low binding | |
| clone 906 | | | response | |

[0820] To support further in vivo and in vitro studies, select clones (C33B836, C33B782, C33B778, C33B904, C33B806, C33B830, C33B937, C33B792, C33B760, and C33B777) were chosen for scale-up and fab arm exchange to produce bi-specific molecules with anti-CD3 antibodies. ExpiCHO-S™ cells (ThermoFisher Scientific) were seeded at 1.25×10⁵-2.25×10⁵ viable cells/mL in ExpiCHO™ Expression Medium and cultured in polycarbonate, disposable, sterile, vented, non-baffled Erlenmeyer shake flasks in a 37° C., 7% CO₂ shaker incubator (INFORS HT Multitron Pro). For routine cell growth in 125 mL-2 L shake flasks, the shake speed was set to 130 rpm for shakers with a 19 mm shaking diameter. Cells were sub-cultured when the density reached log phase growth at 4×10⁶-6×10⁶ viable cells/mL with a 98-99% viability.

[0821] Two days before transfection, ExpiCHO-S™ cells were seeded at 1.5×10⁶ viable cells/mL for the required culture volume. On the day of transfection, the viable cell density and percent viability was determined. Cells were transfected at a density of 6×10⁶ viable cells/mL. For optimal transfection, sterile heavy and light chain plasmid DNA at ≥1 mg/mL concentration in TE buffer (10 mM Tris-HCl, 1 mM EDTA, pH 8.0) was used.

[0822] ExpiCHO-S™ cells were transfected following manufacturer's Max Titer Transfection protocol (ThermoFisher Publication Number MAN0014337). All amounts and volumes shown below were per mL of the final transfected culture volume. Briefly, plasmid DNA was diluted with 0.04 mL cold OptiPRO™ medium (ThermoFisher Scientific) at the following ratio: 0.125 μg Heavy Chain DNA: 0.375 μg Light Chain DNA: 0.5 μg pAdvantage. 6.4 μL of ExpiFectamine™ CHO Transfection Reagent was diluted and mixed gently with 0.04 mL cold OptiPRO™ medium and incubated for 1 min. The diluted ExpiFectamine™ CHO Reagent was added to the diluted DNA, mixed gently and the ExpiFectamine™ CHO/plasmid DNA complexes were incubated at room temperature for 5 minutes. Post-incubation, the complexes were added to the ExpiCHO-S™ cells in a shaker flask and incubated overnight in a 37° C., 7% CO2 shaker incubator.

[0823] For the Max Titer protocol, on Day 1 post-transfection, 6 μL ExpiFectamine™ CHO Enhancer and 160 μL ExpiCHO™ Feed were added and the flask was transferred to a 32° C., 7% CO2 shaker incubator. On Day 5 post-transfection, 160 μL of ExpiCHO™ Feed was added for the second time to the flask and returned to the 32° C. incubator with shaking. The culture was harvested on Day 12 post-transfection, centrifuged at 5000 rpm for 15 mins and clarified through a 0.2 um Acropak 1500 filter capsule (Pall).

[0824] Expressed antibodies were purified from the clarified supernatants using MabSelect SuRe (GE Healthcare). MabSelect SuRe Protein A columns were equilibrated with 1×D-PBS, pH 7.2 prior to loading individual culture supernatants. Unbound proteins were removed by washing extensively with 1×D-PBS, pH 7.2. Bound proteins were eluted with 0.1 M Na-acetate, pH 3.5. Peak fractions were neutralized with 2.5M Tris pH 7.2 and pooled. The neutralized fraction pools were either dialyzed into 1×dPBS for assays and biophysical characterization or utilized for bispecific assembly.

[0825] The protein concentration for each elution pool was determined by measuring absorbance at OD280 nm and calculated using absorbance extinction coefficient based on the amino acid sequence.

[0826] 6 Preparation and Functional Evaluation of CD33×CD3 Bispecific Antibodies

[0827] 6-1 Fab-Arm Exchange Using Purified Parental mAbs

[0828] The formation of the CD33×CD3 bispecific antibodies requires two parental mAbs, one specific for the targeting arm (e.g. CD33) and one specific for the effector arm (e.g. CD3). CD33 mAbs were recombined with a high affinity (CD3B376: VH of SEQ ID NO: 652, and VL of SEQ IF NO: 661) or low affinity CD3 arm (CD3B450: VH of SEQ ID NO: 657, and VL of SEQ IF NO: 678) arms. These parental mAbs (CD33 and CD3 arms) are in the IgG4 PAA format (Labrijn et al, 2013) where the targeting parent (CD33) contains the 409R Genmab mutation (native amino acid for IgG4), while the killing parent (CD3) contains the F405L mutation and R409K. The monospecific anti-CD3 antibody was expressed as IgG4, having Fc substitutions S228P, F234A, L235A, F405L, and R409K (CD3 arm) (numbering according to EU index) in their Fc regions. The monospecific antibodies were expressed and purified as described above. Post purification the parental CD33 antibodies were mixed with the desired parental CD3 antibody under reducing conditions in 75 mM 2-MEA (2-Mercaptoethylamine) and incubated at 31° C. for 5 hours or at room temperature overnight. The recombination reactions were based on molar ratios, where a set amount of CD33 antibody (e.g., 10 mg, or ˜74.6 nanomoles) was combined with CD3 antibody (e.g., ˜67.8 nanomoles), where the CD33 antibody was added in a 6% excess of the CD3 antibody. The concentrations of the CD33 antibody stocks varied from 0.8 to 6 mg/mL, and the volumes of the recombination reactions varied for each pairing. The recombination reactions were subsequently dialyzed overnight against PBS to remove the reductant. The CD33×CD3 bispecific antibody reactions were performed with an excess of the CD33 antibody (ratio) to minimize the amount of unreacted CD3 parental antibody remaining after recombination.

[0829] The final CD33×CD3 bispecific antibodies produced, along with the parental mAbs (i.e. CD33, CD3, or Null) used in the recombination reactions are listed in Table 47.

[0830] Selected CD33 hits were also paired with a non-killing arm (Null) to create negative controls for testing purposes. For control bispecific antibodies, B2M1, an RSV antibody in the IgG4 PAA format was generated, purified and, combined with either the CD3 arms CD3B219 or CD3B376-F405L, R409K to generate CD3B288 (CD3×Null) and CD3B510 (CD3B376×Null), respectively; CD33 arms were combined with B23B49 to generate CD33×Null, as in Table 52.

TABLE 52
CD33 × CD3 bispecific antibodies

| | | | VH Pep | | VL Pep |
|---|---|---|---|---|---|
| Bispecific Ab | Parental | HC Pep ID | SEQ ID | LC Pep ID | SEQ ID |
| C3CB7 | C33B836 | C33H80 | 267 | C33L73 | 306 |
| | CD3B219 | CD3H141 | 247 | CD3L66 | 287 |
| C3CB5 | C33B830 | C33H84 | 269 | C33L66 | 308 |
| | CD3B219 | CD3H141 | 247 | CD3L66 | 287 |
| C3CB4 | C33B806 | C33H69 | 260 | C4LL152 | 300 |
| | CD3B219 | CD3H141 | 247 | CD3L66 | 287 |
| C3CB16 | C33B799 | C33H98 | 275 | C33L69 | 314 |
| | CD3B219 | CD3H141 | 247 | CD3L66 | 287 |
| C3CB14 | C33B792 | C33H87 | 270 | C33L35 | 309 |
| | CD3B219 | CD3H141 | 247 | CD3L66 | 287 |
| C3CB12 | C33B782 | C33H72 | 262 | C33L40 | 301 |
| | CD3B219 | CD3H141 | 247 | CD3L66 | 287 |
| C3CB11 | C33B778 | C33H66 | 258 | C33L60 | 298 |
| | CD3B219 | CD3H141 | 247 | CD3L66 | 287 |
| C3CB10 | C33B777 | C33H65 | 257 | C33L47 | 297 |
| | CD3B219 | CD3H141 | 247 | CD3L66 | 287 |
| C3CB8 | C33B760 | C33H45 | 250 | C33L11 | 290 |
| | CD3B219 | CD3H141 | 247 | CD3L66 | 287 |
| C3CB97 | C33B836 | C33H80 | 267 | C33L73 | 306 |
| | CD3B376 | CD3H219 | 652 | CD3L150 | 661 |
| C3CB98 | C33B830 | C33H84 | 269 | C33L66 | 287 |
| | CD3B376 | CD3H219 | 652 | CD3L150 | 661 |
| C3CB99 | C33B806 | C33H69 | 260 | C4LL152 | 300 |
| | CD3B376 | CD3H219 | 652 | CD3L150 | 661 |
| C3CB100 | C33B799 | C33H98 | 275 | C33L69 | 314 |
| | CD3B376 | CD3H219 | 652 | CD3L150 | 661 |
| C3CB101 | C33B792 | C33H87 | 270 | C33L35 | 309 |
| | CD3B376 | CD3H219 | 652 | CD3L150 | 661 |
| C3CB102 | C33B782 | C33H72 | 262 | C33L40 | 301 |
| | CD3B376 | CD3H219 | 652 | CD3L150 | 661 |
| C3CB103 | C33B778 | C33H66 | 258 | C33L60 | 298 |
| | CD3B376 | CD3H219 | 652 | CD3L150 | 661 |
| C3CB104 | C33B777 | C33H65 | 257 | C33L47 | 297 |
| | CD3B376 | CD3H219 | 652 | CD3L150 | 661 |
| C3CB105 | C33B760 | C33H45 | 250 | C33L11 | 290 |
| | CD3B376 | CD3H219 | 652 | CD3L150 | 661 |
| C33B941 | C33B836 | C33H80 | 267 | C33L73 | 306 |
| | B23B49 | B23H1 | 246 | B23L3 | 286 |
| C33B942 | C33B830 | C33H84 | 269 | C33L66 | 308 |
| | B23B49 | B23H1 | 246 | B23L3 | 286 |
| C33B943 | C33B806 | C33H69 | 260 | C4LL152 | 300 |
| | B23B49 | B23H1 | 246 | B23L3 | 286 |
| C33B944 | C33B799 | C33H98 | 275 | C33L69 | 314 |
| | B23B49 | B23H1 | 246 | B23L3 | 286 |
| C33B945 | C33B792 | C33H87 | 270 | C33L35 | 309 |
| | B23B49 | B23H1 | 246 | B23L3 | 286 |
| C33B946 | C33B782 | C33H72 | 262 | C33L40 | 301 |
| | B23B49 | B23H1 | 246 | B23L3 | 286 |
| C33B947 | C33B778 | C33H66 | 258 | C33L60 | 298 |
| | B23B49 | B23H1 | 246 | B23L3 | 286 |
| C33B948 | C33B777 | C33H65 | 256 | C33L47 | 297 |
| | B23B49 | B23H1 | 246 | B23L3 | 286 |
| C33B949 | C33B760 | C33H45 | 250 | C33L11 | 290 |
| | B23B49 | B23H1 | 246 | B23L3 | 286 |
| CD3B288 | B23B39 | B23H1 | 246 | B23L3 | 286 |
| | CD3B219 | CD3H141 | 247 | CD3L66 | 287 |
| CD3B510 | B23B39 | B23H1 | 246 | B23L3 | 286 |
| | CD3B376 | CD3H219 | 652 | CD3L150 | 661 |
| C3CB87 | C33B903 | C33H251 | 280 | C33L117 | 319 |
| | CD3B219 | CD3H141 | 247 | CD3L66 | 287 |
| C3CB88 | C33B904 | C33H252 | 281 | C33L118 | 320 |
| | CD3B219 | CD3H141 | 247 | CD3L66 | 287 |
| C3CB89 | C33B905 | C33H253 | 282 | C33L119 | 321 |
| | CD3B219 | CD3H141 | 247 | CD3L66 | 287 |
| C3CB90 | C33B907 | C33H255 | 284 | C33L121 | 323 |
| | CD3B219 | CD3H141 | 247 | CD3L66 | 287 |
| C3CB91 | C33B908 | C33H256 | 285 | C33L122 | 324 |
| | CD3B219 | CD3H141 | 247 | CD3L66 | 287 |
| C3CB189 | C33B904 | C33H252 | 281 | C33L118 | 320 |
| | CD3B376 | CD3H219 | 652 | CD3L150 | 661 |

Pep: Peptide;
Nuc: Nucleotide;
SEQ ID: SEQ ID NO

[0831] 6-2 Ex Vivo CD33×CD3 Mediated Reduction of AML Blasts and T Cell Activation in an AML Primary Sample

[0832] To further assess the cytotoxicity potential of CD33×CD3 bispecific antibodies, an ex vivo cytotoxicity assay was performed using AML patient whole blood using the top four antibodies (FIG. 61). In this assay, various bispecific antibodies (CD33 antibodies paired with either CD3 arm CD3B219 and CD3B376) were added to diluted whole blood from AML patients for a period of 48 hours without providing additional T-cells, since this assay relies on the presence of autologous T-cells in the patient's blood. At 48 hours, the samples were stained with CD3 PerCPCy5.5, CD25 PE, CD33 FITC and CD38 APC (all antibodies were purchased from Biolegend; San Diego, Calif.). The samples were then washed at least 3 times in 1× Lyse RBC Lysis Buffer (eBioscience). The samples were then stained with the LIVE/DEAD® Fixable Near-IR Dead Cell Stain buffer (Life Technologies). The extent of tumor cytotoxicity was determined by first quantifying the live CD33⁺ cells in the fraction of AML patient cancer cells (defined as CD3-CD38⁺ cells) in the presence of the bispecific antibodies. Cytotoxicity was calculated as a percentage relative to PBS/untreated control using the following equation: (% CD33⁺ in PBS/untreated control-% CD33⁺ in treated sample)/(% CD33⁺ in PBS/untreated control). T cell activation was calculated as a percentage of CD25⁺ events in CD3⁺ fraction.

[0833] As shown in FIG. 61, all CD33 lead antibodies paired with either CD3 arm (CD3B376 and CD3B219) promoted a dose-dependent reduction of total cytotoxicity that correlated with T cell activation after 48 hours. Null arm control antibodies (Null×CD3B219 and null×CD3B376) failed to show tumor cell cytotoxicity or T cell activation. This result also demonstrated that the CD33× CD3 bispecific antibodies work in an autologous setting. These results are representative of 4 other AML donor samples (data not shown). Table 53 summarizes the EC₅₀ values generated with the CD33×CD3 multispecific antibodies. As seen from the EC₅₀ values, C33B904 paired with either CD3 arm (C3CB88, C3CB189) as well C33B836 paired with either CD3 arm (C3CB7, C3CB97) were the most potent and efficacious antibodies. These 4 antibodies were thus the focus of further characterization.

TABLE 53
CD33 × CD3 T-cell mediated ex vivo cytotoxicity assays. Summary
of the EC₅₀ values for 8 CD33 × CD3 bispecific antibodies

| Bispecifc Ab | Primary AML Cell |
|---|---|
| ID | Killing EC₅₀ (nM) |
| C3CB11 | 3.958 |
| C3CB12 | 2.635 |
| C3CB7 | 0.3315 |
| C3CB88 | 0.6722 |
| C3CB103 | 4.186 |
| C3CB102 | 4.973 |
| C3CB97 | ~0.2316 |
| C3CB189 | 0.5782 |

[0834] 6-3 Demonstration that the CD33×CD3 Bispecific Antibodies Bind to the C2 Domains of CD33 and Induce Cytotoxicity of CD33 Single Nucleotide Polymorphism (SNP) Expressing Cell Lines

[0835] In Vitro T Cell Mediated Cytotoxicity Assays with CD33× CD3 Bispecific Antibodies

[0836] Recent studies showed that a single nucleotide polymorphism (SNP) rs12459419 was present in ˜50% of the AML population and leads to skipping of exon 2 of CD33 which results in the deletion of the V domain of CD33. This study also showed that Mylotarg which binds to the V domain of CD33, had no efficacy in patients that express the SNP, and, therefore, reduced risk of relapse and improved survival in ˜50% of the AML population (Lamba et al 2017, JCO, CD33 Splicing Polymorphism Determines Gemtuzumab Ozogamicin Response in De Novo Acute Myeloid Leukemia: Report From Randomized Phase III Children's Oncology Group Trial AAML0531). Given the data with Mylotarg in the above mentioned study, in vitro T cell mediated cytotoxicity assays were performed to assess whether CD33 hits (V binding C33B836 vs C2 binding C33B904) paired with CD3 arms (CD3B219 or CD3B376) mediate killing of SNP rs12459419 expressing cell lines. Briefly, effector cells (pan T cells purchased from Biological Speciality) were harvested, counted, washed, and resuspended to 1×10⁶ cells/ml in RPMI (Invitrogen) with 10% FBS (Invitrogen) cell media. Target cells (KG1, SH2 and OCIAML3) were labeled with CFSE (Invitrogen) and resuspended to 2×10⁵ cells/mL in RPMI with 10% FBS. KG1, SH2 and OCIAML3 were chosen to represent wildtype, heterozygous and homozygous for the CD33 SNP rs12459419 mutation, respectively. Effectors and CFSE-labeled target cells were mixed at effector:target ratio (E:T)=5:1 in sterile 96-well round bottom plates. 10 μl of Fc block (ReoPro Fc fragment) along with 5 μL aliquot of bispecific antibody was added to each well containing various concentrations. Cultures were incubated at 37° C. for 48 hours under 5% CO2. After 48 hrs, the LIVE/DEAD® Fixable Near-IR Dead Cell Stain buffer (Life Technologies) was added to samples and cultures were incubated for 20 min in the dark at RT, washed, and resuspended in 100-200 μL FACs buffer. The drug-induced cytotoxicity was determined using CANTO II flow cytometer (BD Biosciences) and analyzed with FlowJo Software or Dive software (BD Biosciences). The population of interest is the double positive CFSE+/live/dead+ cells. As shown in FIG. 62, unlike the null arm controls (null×CD3B219 and null×CD3B376), V binding and C2 binding CD33×CD3 multispecific antibodies induced T cell redirected cell cytotoxicity of CD33+WT for SNP rs12459419 mutation cell line KG1 at 48 hrs. In contrast, unlike V binder C33B836 (C3CB97, C3CB7), only the C2 binding C33B904 paired bispecific antibodies (C3CB189, C3CB88) mediated cytotoxicity of SH2 and OCIAML3 cell lines that were heterozygous or homozygous for the rs12459419 SNP mutations, respectively. For this reason, C33B904 paired bispecific antibodies (C3CB189, C3CB88) were taken forward for further analysis and characterization. Collectively, these data suggest that CD33 C2 binding bispecific antibodies such as C33B904 paired bispecific antibodies have the potential to show efficacy in a broader group of AML patients than V binding competitor anti-CD33 antibodies.

[0837] 6-4 Ex Vivo CD33×CD3 Mediated Reduction of Spiked in MOLM-13 and Monocytes in an Ex Vivo Whole Blood MOLM-13 Cytotoxicity Assay

[0838] To assess the cytotoxicity potential of CD33×CD3 bispecific antibodies at eliminating spiked in MOLM-13 cells and normal human monocytes, an ex vivo cytotoxicity assay using normal healthy human whole blood with exogenously added CD33⁺ AML cell line MOLM-13 was utilized. Similar to the above experiment, various bispecific antibodies (CD33 antibodies paired with either CD3 arm CD3B219 and CD3B376) were added to diluted whole blood from 6 different normal human donors for a period of 48 hr without providing additional T-cells, since this assay relies on the presence of autologous T-cells in the donor's blood. Prior to dilution, the concentration of T cells in the blood of each donor was enumerated. The blood was then diluted with CFSE (Invitrogen) labeled MOLM-13 cells, such that effector:target ratio (E:T) is 1:5 to mimic the effector: target ratio in AML patient samples. At 48 hs, the samples were stained with CD3 PerCPCy5.5, CD25 PE, CD33 FITC and CD14 Pacific Blue (all antibodies were purchased from Biolegend). The samples were then washed at least 3 times in 1× Lyse RBC Lysis Buffer (eBioscience). The samples were then stained with the LIVE/DEAD® Fixable Near-IR Dead Cell Stain buffer (Life Technologies). The extent of tumor cytotoxicity was determined by first quantifying the live CD33⁺ cells in the fraction of CD14⁺ monocytes in the presence of the bispecific antibodies. Cytotoxicity of MOLM-13 cells was determined by enumerating the percentage of dead CFSE⁺ cells. Cytotoxicity of monocytes was calculated as a percentage relative to PBS/untreated control using the following equation: (% CD33⁺CD14⁺ in PBS/untreated control-% CD33⁺CD14⁺ in treated sample)/(% CD33⁺CD14⁺ in PBS/untreated control). The data in FIG. 63 indicate that both CD33×CD3 bispecific antibodies (same CD33 lead C33B904 paired with either CD3 arm, CD3B376 and CD3B219) specifically induce cell cytotoxicity of MOLM-13 cells and CD33⁺ monocytes at 48 hr. The null arm controls were used as negative bispecific antibody controls. The null arm control showed little-to-no cytotoxicity activity of the MOLM-13 and CD33⁺ monocytes. These data show the average values of 6 different normal donors. The average EC₅₀ values for cytotoxicity of MOLM-13 and CD14⁺ monocytes are shown in Table 54.

TABLE 54
CD33 × CD3 T-cell mediated ex vivo cytotoxicity assays. Summary
of EC₅₀ values for 2 CD33 × CD3 bispecific antibodies.

| | | CD33⁺ CD14⁺ |
|---|---|---|
| Bispecific Ab | MOLM13 Killing EC₅₀ | Killing EC₅₀ |
| ID | (nM) | (nM) |
| C3CB189 | 0.1677 | 1.156 |
| C3CB88 | 0.671 | 0.506 |

[0839] 6-5 Demonstration of Species Cross-Reactivity of CD33×CD3 Bispecific Antibodies to Cynomologous Monkey

[0840] Ex Vivo CD33× CD3 Mediated Reduction of Monocytes in an Ex Vivo Cytotoxicity Assay with Cynomologous Whole Blood

[0841] To demonstrate functional cross-reactivity and to assess the cytotoxicity potential of CD33×CD3 bispecific antibodies at eliminating normal cynomologous monocytes, an ex vivo cytotoxicity assay using healthy cynomologous whole blood was utilized. Similar to the above experiment, various bispecific antibodies (CD33 antibodies paired with either CD3 arm CD3B219 and CD3B376) were added to diluted whole blood from 6 different normal cynomologous monkey donors for a period of 48 hr without providing additional T-cells, since this assay relies on the presence of autologous T-cells in the donor's blood. At 48 hrs, the samples were stained with CD3 PerCPCy5.5, CD25 PE, CD33 FITC and CD14 Pacific Blue (all antibodies were purchased from Biolegend except for the CD33 antibody which was purchased from Miltenyi; Bergisch Gladbach, Germany). The samples were then washed at least 3 times in 1×Lyse RBC Lysis Buffer (eBioscience) prior to staining with the LIVE/DEAD® Fixable Near-IR Dead Cell Stain buffer (Life Technologies). The extent of monocyte cytotoxicity was determined by first quantifying the live CD33⁺ cells in the fraction of CD14⁺ monocytes in the presence of the bispecific antibodies. Cytotoxicity was calculated as a percentage relative to PBS/untreated control using the following equation: (% CD33⁺CD14⁺ in PBS/untreated control-% CD33⁺CD14⁺ in treated sample)/(% CD33⁺CD14⁺ in PBS/untreated control). T cell activation was calculated as a percentage of CD25⁺ events in CD3⁺ fraction. The data in FIG. 64 indicated that both CD33×CD3 bispecific antibodies (same CD33 lead C33B904 paired with either CD3 arm, CD3B376 and CD3B219) specifically induced cell cytotoxicity of CD33⁺ monocytes as well as T cell activation at 48 hr. The null arm controls were used as negative bispecific antibody controls and showed little-to-no cytotoxicity or T cell activity. Table 55 shows the average values of 6 different cynomologous donors.

TABLE 55
CD33 × CD3 T-cell mediated ex vivo cytotoxicity assays. Summary
of the EC₅₀ values for 2 CD33 × CD3 bispecific antibodies.

| | CD33⁺ CD14⁺ | T cell |
|---|---|---|
| Protein AA ID | Killing EC₅₀ (nM) | activation EC₅₀ (nM) |
| C3CB189 | 3.60 | 0.02 |
| C3CB88 | 0.89 | 0.02 |

[0842] 6-6 Efficacy of C3CB189 and C3CB88 in MOLM-13 Human AML Xenografts in T Cell Humanized NSG Mice

[0843] Efficacy of C3CB189 and C3CB88 was evaluated in established luciferase-transfected disseminated MOLM-13 human acute myeloid leukemia (AML) xenografts in female NOD.Cg-Prkdc^{scid} Il2rg^{tm1Wjl}/SzJ (NSG) mice humanized with 20 million T cells. Animals were randomized into n=10/group by live bioluminescence imaging (BLI) on day 5 post-i.v. tumor implantation. C3CB189 and C3CB88 at 0.005, 0.05 and 0.5 mg/kg or Null×CD3 antibody control at 0.5 mg/kg were dosed i.p. every 3-4 days for 6 weeks.

[0844] On day 13 post-tumor implantation, when at least eight animals remained per group, tumor growth inhibition (% TGI) as determined by bioluminescence was calculated. Statistically significant tumor growth inhibition was observed with C3CB189 (FIG. 65) and C3CB88 (FIG. 67) at all concentrations, as compared to Null×CD3 control. C3CB189 at 0.005, 0.05, and 0.5 mg/kg elicited tumor growth inhibition of 76%, 100% and 82%, respectively, and C3CB88 at 0.005, 0.05, and 0.5 mg/kg elicited tumor growth inhibition of 100%, 100% and 91%, respectively, as compared to Null×CD3 treated controls.

[0845] Treatment with C3CB189 and C3CB88 resulted in reduced tumor burden and increased life span (ILS) greater than the 16-day median survival of the Null×CD3 control group. Animals treated with C3CB189 had a median survival of 19-27.5 days (FIG. 66) and animals treated with C3CB88 had a median survival of 26-28.5 (FIG. 68) days across doses. C3CB189 at 0.005, 0.05, and 0.5 mg/kg resulted in an increased life span of 19%, 72% and 50%, respectively, and C3CB88 resulted in an increased life span of 63%, 78% and 72%, respectively, as compared to the control group.

[0846] 7 TMEFF2 Antibodies

[0847] 7-1 Antigen Generation

[0848] Human extracellular domain (ECD) TMEFF2 was produced based on UniProt Accession # Q9UIK5 sequence. The ECD construct was designed with a 6×His-tag (SEQ ID NO: 596) and Avi-tag sequences at the C-terminus (construct TMEW1; SEQ ID NO: 578). A construct containing the FS2 and EGF domains (amino acids 151-320 was designed as a human serum albumin (HSA) fusion with a 6×His-tag (SEQ ID NO: 596) and avitag sequences (construct TMEW7; SEQ ID NO: 579). A construct containing the TMEFF2 membrane proximal domain (residues 230-320) was designed with a 6×His tag (SEQ ID NO: 596) (construct TMEW19; SEQ ID NO: 580) or fused to a rat IgG1 Fc with a His-tag (construct TMEW20; SEQ ID NO: 581). Residues 230-320 of TMEFF2 contain the EGF domain which spans the residues 261-301 of TMEFF2. The human TMEFF2 ECD expression constructs were transiently transfected into HEK293 derived cells, Expi293 (Gibco/Thermo Fisher Scientific) using Expifectamine according to manufacturer protocol. Cells were incubated 5 days at 37° C. with 8% CO2 on an orbital shaker before harvesting. The expressed cells were removed by centrifugation and the soluble TMEFF2 proteins with his-tags were purified from the media using immobilized metal affinity chromatography using Ni Sepharose 6 Fast Flow resin (GE Healthcare) followed by Superdex 200 preparative size exclusion chromatography (SEC) (GE Healthcare) in Dubelcco's Phosphate Saline buffer pH 7.2 (1×DPBS). The amino acid sequences of the generated antigens are shown in Table 58.

TABLE 58

| Protein AA ID | Description | Amino Acid Sequence |
|---|---|---|
| TMEW1 | TMEFF2-FL-ECD-His- | FPTSLSDCQTPTGWNCSGYDDRENDLFLCDTNTCK |
| (SEQ ID NO: 578) | Avitag | FDGECLRIGDTVTCVCQFKCNNDYVPVCGSNGESY |
| | | QNECYLRQAACKQQSEILVVSEGSCATDAGSGSGD |
| | | GVHEGSGETSQKETSTCDICQFGAEVDEDAEDVWC |
| | | VCNIDCSQTNFNPLCASDGKSYDNACQIKEASCQK |
| | | QEKEIVMSLGRCQDNTTTTTKSEDGHYARTDYAEN |
| | | ANKLEESAREHHIPCPEHYNGFCMHGKCEHSINMQ |
| | | EPSCRCDAGYTGQHCEKKDYSVLYVVPGPVRFQYV |
| | | GGGSHHHHHHLNDIFEAQKIEWHE |
| TMEW7 | FS2-EGF-Tev- | SGETSQKETSTCDICQFGAEVDEDAEDVWCVCNID |
| (SEQ ID NO: 579) | HSA(C34S)-His- | CSQTNFNPLCASDGKSYDNACQIKEASCQKQEKIE |
| | Avitag | VMSLGRCQDNTTTTTKSEDGHYARTDYAENANKLE |
| | | ESAREHHIPCPEHYNGFCMHGKCEHSINMQEPSCR |
| | | CDAGYTGQHCEKKDYSVLYVVPGPVRFQYVGSGSG |
| | | SENLYFQGVRSSSDAHKSEVAHRFKDLGEENFKAL |
| | | VLIAFAQYLQQSPFEDHVKLVNEVTEFAKTCVADE |
| | | SAENCDKSLHTLFGDKLCTVATLRETYGEMADCCA |
| | | KQEPERNECFLQHKDDNPNLPRLVRPEVDVMCTAF |
| | | HDNEETFLKKYLYEIARRHPYFYAPELLFFAKRYK |
| | | AAFTECCQAADKAACLLPKLDELRDEGKASSAKQR |
| | | LKCASLQKFGERAFKAWAVARLSQRFPKAEFAEVS |
| | | KLVTDLTKVHTECCHGDLLECADDRADLAKYICEN |
| | | QDSISSKLKECCEKPLLEKSHCIAEVENDEMPADL |
| | | PSLAADFVESKDVCKNYAEAKDVFLGMFLYEYARR |
| | | HPDYSVVLLLRLAKTYETTLEKCCAAADPECYAKV |
| | | FDEFKPLVEEPQNLIKQNCELFEQLGEYKFQNALL |
| | | VRYTKKVPQVSTPTLVEVSRNLGKVGSKCCKHPEA |
| | | KRMPCAEDYLSVVLNQLCVLHEKTPVSDRVTKCCT |
| | | ESLVNRRPCFSALEVDETYVPKEFNAETFTFHADI |
| | | CTLSEKERQIKKQTALVELVKHKPKATKEQLKAVM |
| | | DDFAAFVEKCCKADDKETCFAEEGKKLVAASQAAL |
| | | GLGGGSHHHHHHLNDIFEAQKIEWHE |
| TMEW19 | spTMEFF2(230- | NTTTTTKSEDGHYARTDYAENANKLEESAREHHIP |
| (SEQ ID NO: 580) | 320)G3S-H6 | CPEHYNGFCMHGKCEHSINMQEPSCRCDAGYTGQH |
| | | CEKKDYSVLYVVPGPVRFQYVGGGSHHHHHH |
| TMEW20 | spTMEFF2(230-320)- | NTTTTTKSEDGHYARTDYAENANKLEESAREHHIP |
| (SEQ ID NO: 581) | G3S-ratIgG1Fc | CPEHYNGFCMHGKCEHSINMQEPSCRCDAGYTGQH |
| | | CEKKDYSVLYVVPGPVRFQYVGGGSPRNCGGDCKP |
| | | CICTGSEVSSVFIFPPKPKDVLTITLTPKVTCVVV |
| | | DISQDDPEVHFSWFVDDVEVHTAQTRPPEEQFNST |
| | | FRSVSELPILHQDWLNGRTFRCKVTSAAFPSPIEK |
| | | TISKPEGRTQVPHVYTMSPTKEEMTQNEVSITCMV |
| | | KGFYPPDIYVEWQMNGQPQENYKNTPPTMDTDGSY |
| | | FLYSKLNVKKEKWQQGNTFTCSVLHEGLHNHHTEK |
| | | SLSHSPGKGGGSHHHHHH |

[0849] 7-2 Generation of Anti-TMEFF2 Antibodies

### Antibody Generation Using Transgenic Rats Expressing Human Immunoglobulin Loci (OmniRat®)

[0850] The OmniRat® contains a chimeric human/rat IgH locus (comprising 22 human V_{H}s, all human D and J_{H} segments in natural configuration linked to the rat C_{H} locus) together with fully human IgL loci (12 Vκs linked to Jκ-Cκ and 16 Vλs linked to Jλ-Cλ). (see e.g., Osborn, et al. (2013) J Immunol 190(4): 1481-1490). Accordingly, the rats exhibit reduced expression of rat immunoglobulin, and in response to immunization, the introduced human heavy and light chain transgenes undergo class switching and somatic mutation to generate high affinity chimeric human/rat IgG monoclonal antibodies with fully human variable regions. The preparation and use of OmniRat®, and the genomic modifications carried by such rats, is described in WO14/093908.

[0851] OmniRats were immunized with the human TMEFF2 construct FS2-EGF-Tev-HSA(C34S)-His-Avitag (TMEW7, SEQ ID NO: 579) and boosted with the construct spTMEFF2 (230-320)G3S-ratIgG1Fc (TMEW20, SEQ ID NO: 581). Following a 89 day immunization regimen, lymph nodes from the rats were harvested and used to generate hybridomas and the hybridoma supernatants were screened for binding to human TMEFF2-FL-ECD-His-Avitag (TMEW1) protein by ELISA and/or SPARCL (Spatial Proximity Analyte Reagent Capture Luminescence). Several supernatants were selected for secondary ELISA and SPARCL screening of binding to TMEFF ECD, FS2-EGF, or EGF domain only TMEFF2. Based on the screening results, several hybridoma clones were sequenced, expressed and characterized for functionality.

Antibody Generation from Phage Display Libraries

[0852] TMEFF2 binding Fabs were selected using standard methods from two sets of de novo pIX phage display libraries as described in Shi et al., J Mol Biol 397:385-96, 2010 and WO2009/085462). Briefly, two sets of libraries, referred to as V3.0 and V5.0, were generated by diversifying human scaffolds where germline VH genes IGHV1-69*01, IGHV3-23*01 and IGHV5-51*01 were recombined with the human IGHJ-4 minigene via the H3 loop (IGHJ-6 minigene was also used in V5.0), and human germline VLkappa genes O12 (IGKV1-39*01), L6 (IGKV3-11*01), A27 (IGKV3-20*01), and B3 (IGKV4-1*01) were recombined with the IGKJ-1 minigene to assemble complete VH and VL domains. Positions in the heavy and light chain variable regions around the H1, H2, L1, L2 and L3 loops in frequent contact with protein and peptide antigens were chosen for diversification. Sequence diversity at selected positions was limited to residues occurring at each position in the IGHV or IGLV germline gene families of the respective IGHV or IGLV genes. Diversity at the H3 loop was generated by utilizing short to mid-sized synthetic loops of lengths 7-14 amino acids for V3.0 libraries, and lengths 6-19 amino acids for V5.0 libraries. The amino acid distribution at H3 was designed to mimic the observed variation of amino acids in human antibodies. The scaffolds utilized to generate libraries were named according to their human VH and VL germline gene origin. For both V3.0 and V5.0 sets, each of the three heavy chain libraries were combined with the four germline light chains or germline light chain libraries to generate 12 unique VH:VL combinations for each set of libraries which are used for selection experiments.

### V Region Cloning

[0853] Total RNA from hybridoma cell lysates of phage were purified using RNeasy 96 kit (Qiagen) following the manufacturer's protocol. The resulting RNA was quantitated using Drop Sense and either stored at −80° C. or used for cDNA synthesis using Invitrogen SuperScript III First-Strand Synthesis System by RT-PCR (Invitrogen). The first strand cDNA synthesis was carried out using gene specific primers annealed to the constant regions of heavy, kappa, and lambda chains, respectively. The RT-PCR reaction mixture comprised of up to 3 μg of purified RNA, gene specific primer, dNTP mix, reaction buffer, 25 mM MgCl₂, DTT, RNaseOUT™ (40 U/μl, Invitrogen), and SuperScript™ III RT (200 U/μl, Invitrogen Cat #18080-051) was incubated at 50° C. for 50 minutes and 85° C. for 5 minutes. The resulting single-stranded cDNA was stored at −20° C., or used directly for PCR amplification. The PCR reaction was carried out using Platinum Pfx polymerase (Invitrogen). The v-region fragments were amplified by forward and reverse primers annealing to the leader sequences and constant regions of heavy, kappa and lambda chains, respectively, using optimized PCR conditions. The resulting PCR fragments were sequenced, the amino acid sequences of the recovered v-regions were codon optimized and cloned into the pUnder-based expression vector carrying the IgG4 constant region with S228P, F234A and L235A mutations (IgG4PAA isotype).

### Expi293 Small Scale Transfection and Purification

[0854] Select antibodies identified from the immunization campaigns or phage display were cloned and expressed as IgG1PAA and purified via small 2 ml scale. Expi293™ cells (ThermoFisher Scientific) were seeded at 1.25×10⁵-2.25×10⁵ viable cells/mL density in Expi293™ Expression Medium and cultured in 125 mL-2 L shake flasks at 37° C., 7% CO₂. Cells were sub-cultured when density reached the log phase growth at 3×10⁶-5×10⁶ viable cells/mL with a 98-99% viability.

[0855] On day of transfection, the viable cell density and percent viability was determined. Cells were transfected at a density of 3×106 viable cells/mL following manufacturer's Transfection protocol (ThermoFisher Publication Number MAN0007814). Culture were harvested on Day 6 post-transfection by centrifugation at 850×G for 15 minutes before purification. Antibodies were purified from the clarified supernatants using mAb Select Sure resin (GE Healthcare) and dialyzed into PBS. Protein concentrations were determined by A280 measurement on the filtrate using a DropSense Instrument (Trinean).

[0856] 7-3 Characterization of Anti-TMEFF2 Antibodies

Anti-TMEFF2 Antibodies Bind TMEFF2 with High Affinity

[0857] Binding of select IgG4PAA anti-TMEFF2 antibodies to TMEFF2 ECD (TMEW1: TMEFF2-FL ECD-His-Avitag) and/or the membrane proximal region (TMEW19: spTMEFF2(230-320)G3S-H6) was assessed using Proteon (TMEB674, TMEB675, TMEB 565 and TMEB570) or Biacore SPR (TMEB762 and TMEB757). The kinetic parameters of binding selected antibodies are show in Table 59. The anti-TMEFF2 antibodies were found to bind both the TMEFF2 ECD and TMEFF2 membrane proximal region with picomolar affinities.

TABLE 59

| | | TMEFF2 | | | |
|---|---|---|---|---|---|
| Antibody | Antigen | domain | ka (1/Ms) | kd (1/s) | KD (nM) |
| TMEB674 | TMEW1 | ECD | 2.01E+06 | 1.62E−04 | 0.10 |
| TMEB674 | TMEW19 | MP* | 8.37E+05 | 1.75E−04 | 0.20 |
| TMEB675 | TMEW1 | ECD | 2.65E+06 | 1.53E−04 | 0.10 |
| TMEB675 | TMEW19 | MP | 9.72E+05 | 1.58E−04 | 0.20 |
| TMEB565 | TMEW1 | ECD | 3.84E+05 | 9.13E−06 | 0.02 |
| TMEB565 | TMEW19 | MP | 7.77E+05 | 6.39E−06 | 0.01 |
| TMEB570 | TMEW1 | ECD | 4.64E+05 | 5.13E−05 | 0.11 |
| TMEB570 | TMEW19 | MP | 7.62E+05 | 4.67E−05 | 0.06 |
| TMEB762 | TMEW1 | ECD | 5.41E+05 | 1.74E−04 | 0.32 |
| TMEB757 | TMEW1 | ECD | 5.42E+05 | 1.67E−04 | 0.31 |

*MP: membrane proximal region

### ProteOn SPR

[0858] The binding of anti-TMEFF2 mAbs to the ECD and the membrane proximal region of human TMEFF2 was measured by ProteOn SPR (Bio-Rad). The purified mAbs (diluted to a final concentration of 1 μg/ml in PBST) were used as ligands in the assay and were immobilized through Fc capture to Goat Anti-Human (GAH) IgG Fc. For amine coupling of the GAH IgG Fc, a 1:1 mixture of EDC (40 mM) and NHS (10 mM) were mixed immediately prior to injection to activate the chip surface and injected in the vertical orientation. GAH-Fc (at 30 μg/ml) antibody in acetate buffer (pH 5.0) was then flowed over the surface for 300 seconds at 30 μl/min in the vertical orientation. Any remaining reactive carboxyl groups in the surface were subsequently deactivated by injecting 1M Ethanolamine (pH 8.5) in the same orientation. The antibodies were used at a concentration of 1 μg/ml for immobilization. The antibodies were flowed over the surface in the horizontal direction. Human TMEFF2 ECD or the membrane proximal region in 3-fold dilution series of 5 concentrations (highest concentration ranging from 100-600 nM) was flowed in as analyte in the vertical orientation to bind to the captured molecules. A buffer sample was also injected in the 6^{th} channel in the vertical direction to monitor any drift in the baseline signal. The association and dissociation phases for all concentrations were monitored over 3 minutes and 30 (or 15) minutes respectively, at a flow rate of 100 μL/min. The binding surface was regenerated for the next interaction cycle using an 18 second pulse of 0.8% phosphoric acid to remove the bound antigen. The raw data were processed by subtracting two sets of reference data from the response data: 1) the inter-spot signals to correct for the non-specific interactions between the antigen and the empty chip surface; 2) the empty channel signals (where only PBST was flowed over the chip) to correct for non-specific baseline drift.

### Biacore 8K SPR

[0859] The binding of anti-TMEFF2 mAbs to human TMEFF2 ECD was measured by Biacore 8K SPR. The format of the assay was to capture the mAbs using a high density anti-human Fc surface, then inject human TMEFF2 concentration titration using a single cycle kinetics method. Goat anti-human Fc IgG (Jackson Immunoresearch, Cat #109-005-098) was directly immobilized via amine coupling at 30 μg/mL in 10 mM acetate buffer, pH 4.5 on flow cells 1 and 2, on CM5 Sensor Chip (GE) with a flow rate of 30 μL/min in HBSP (GE) buffer. The mAbs were captured on the anti-human Fc IgG surface at 0.5 μg/ml (˜200-300 RU) on flow cell 2. The running buffer was then changed to HBSP+100 ug/ml BSA. TMEFF2 ECD at 30 nM concentration in 3-fold dilution series was injected from low to high concentration using single cycle kinetics method. The off-rate was monitored 30 minutes after the last or highest concentration injection and then the surface was regenerated using 0.8% phosphoric acid (Bio-Rad). A buffer blank run, capturing the same mAbs and using the same conditions of sample run was also completed. The raw data were processed by subtracting two sets of reference data from the response data: 1) reference flow cell 1 subtracted from sample flow cell 2 and 2) buffer blank run from experimental run. The processed data at all concentrations for each mAb were globally fit to a 1:1 simple Langmuir binding model to extract estimates of the kinetic (kon, koff) and affinity (KD) constants.

### Thermal Stability of Anti-TMEFF2 Antibodies

[0860] TMEB675 showed lower than usual thermal stability profile by DSC (Differential Scanning Calorimetry) with onset of unfolding Tm=52° C. and the first thermal transition (Tm1) at =60.4° C. A closer examination of the sequence of TMEB675 (see Example 4) showed the presence of Somatic HyperMutations (SHM) within the framework region of heavy and light chain. Several re-engineered variants were sub-cloned, expressed, purified and profiled by DSC. The resulting mAbs TMEB762 and TMEFB757 showed desirable thermal stability profile (Tm1=69.4° C. and Tm1=69.7° C. respectively). In comparison to TMEB675, TMEB762 had the following amino acid modifications in the heavy chain: R14P, P20L and H81Q, while TMEFB757 had the following amino acid modifications in the heavy chain: R14P and P20L. In comparison to TMEB675, TMEB762 had the following amino acid modifications in the light chain: A1D and A91P, while TMEFB757 had A91P modification in the light chain. Residue numbering is according to Kabat. The kinetic parameters of binding of TMEB675, TMEB762 to TMEFF2 ECD is shown in Table 59.

[0861] 7-4 Structural Characterization of Anti-TMEFF2 Antibodies

[0862] The cDNA sequences and amino acid translations of the antibodies were obtained using standard techniques. After polypeptide sequence determination, some antibody cDNAs encoding the variable regions or full-length antibodies were codon optimized using standard methods for scale-up expression.

[0863] Table 60 shows the HCDR1 and the HCDR2 amino acid sequences of select anti-TMEFF2 antibodies.

[0864] Table 61 shows the HCDR3 amino acid sequences of select anti-TMEFF2 antibodies.

[0865] Table 62 shows the LCDR1 and the LCDR2 amino acid sequences of select anti-TMEFF2 antibodies.

[0866] Table 63 shows the LCDR3 amino acid sequences of select anti-TMEFF2 antibodies.

[0867] Table 64 shows the VH and the VL amino acid sequence of select anti-TMEFF2 antibodies.

[0868] Table 65 shows the SEQ ID NOs: of heavy and light chains of select anti-TMEFF2 antibodies.

[0869] Table 66 shows the heavy chain amino acid sequences of select anti-TMEFF2 antibodies.

[0870] Table 67 shows the light chain amino acid sequences of select anti-TMEFF2 antibodies.

[0871] Table 68 shows the SEQ ID NOs: of polynucleotides encoding various anti-TMEFF2 antibody chains.

TABLE 60

| | | HCDR1 | | HCDR2 |
|---|---|---|---|---|
| | HCDR1 | SEQ | | SEQ |
| mAb | sequence | ID NO: | HCDR2 sequence | ID NO: |
| TMEB675 | SYSMS | 582 | VISGSGGFTDYADSVKG | 584 |
| TMEB570 | SYYIS | 583 | GIIPISGRANYAQKFQG | 585 |
| TMEB674 | SYSMS | 582 | VISGGGSFTSYADSVKG | 586 |
| TMEB565 | SYYIS | 583 | GIIPISGRANYAQKFQG | 585 |
| TMEB762 | SYSMS | 582 | VISGSGGFTDYADSVKG | 584 |
| TMEB757 | SYSMS | 582 | VISGSGGFTDYADSVKG | 584 |

TABLE 61

| mAb | HCDR3 sequence | HCDR3 SEQ ID |
|---|---|---|
| TMEB675 | MPLNSPHDY | 587 |
| TMEB570 | DGYSSGRSTTYAFDY | 16 |
| TMEB674 | MPLNSPHDC | 17 |
| TMEB565 | DGYSSGRSTTYAFDY | 16 |
| TMEB762 | MPLNSPHDY | 587 |
| TMEB757 | MPLNSPHDY | 587 |

TABLE 62

| | | LCDR1 | | LCDR2 |
|---|---|---|---|---|
| | | SEQ | | SEQ |
| mAb | LCDR1 amino acid | ID NO: | amino acid | ID NO: |
| TMEB675 | RASQGIRNDLG | 18 | AASSLQS | 588 |
| TMEB570 | RASQSVSTYYLA | 19 | GASYRAT | 21 |
| TMEB674 | RASQGIRNDLG | 18 | AASSLQS | 588 |
| TMEB565 | RASQGIRNDLG | 18 | AASSLQS | 588 |
| TMEB762 | RASQGIRNDLG | 18 | AASSLQS | 588 |
| TMEB757 | RASQGIRNDLG | 18 | AASSLQS | 588 |

TABLE 63

| mAb | LCDR3 amino acid | LCDR3 SEQ ID NO: |
|---|---|---|
| TMEB675 | LQDYNYALT | 22 |
| TMEB570 | QQYGHSPIT | 23 |
| TMEB674 | LQDYNYSLT | 24 |
| TMEB565 | LQDYNYALT | 22 |
| TMEB762 | LQDYNYPLT | 603 |
| TMEB757 | LQDYNYPLT | 603 |

TABLE 64

| | | VH amino | VH SEQ | | VL amino | VL SEQ |
|---|---|---|---|---|---|---|
| Antibody | VH name | acid sequence | ID NO: | VL name | acid sequence | ID NO: |
| TMEB675 | TMEH411 | EVQLLESGGGLVQRGGSLRP | 25 | TM3L127 | AIQMTQSPSSLSASVGD | 28 |
| | | SCAASGFTFSSYSMSWVRQA | | | RVTITCRASQGIRNDLG | |
| | | PGKGLEWVSVISGSGGFTDY | | | WYQQKPGKAPKLLIYAA | |
| | | ADSVKGRFTISRDNSKNTLY | | | SSLQSGVPSRFSGSGSG | |
| | | LHMNSLRAEDTAVYYCARMP | | | TDFTLTISSLQPEDFAT | |
| | | LNSPHDYWGQGTLVTVSS | | | YYCLQDYNYALTFGGGT | |
| | | | | | KVEIK | |
| TMEB570 | TMEH396 | QVQLVQSGAEVKKPGSSVKV | 589 | TMEL112 | EIVLTQSPGTLSLSPGE | 29 |
| | | SCKASGGTFSSYYISWVRQA | | | RATLSCRASQSVSTYYL | |
| | | PGQGLEWMGGIIPISGRANY | | | AWYQQKPGQAPRLLIYG | |
| | | AQKFQGRVTITADESTSTAY | | | ASYRATGIPDRFSGSGS | |
| | | MELSSLRSEDTAVYYCARDG | | | GTDFTLTISRLEPEDFA | |
| | | YSSGRSTTYAFDYWGQGTLV | | | VYYCQQYGHSPITFGQG | |
| | | TVSS | | | TKVEIK | |
| TMEB674 | TMEH410 | EVQLLESGGLVQPPGGSLRL | 27 | TMEL126 | AIQMTQSPSSLSASVGD | 30 |
| | | SCAASGFTFSSYSMSWVRQA | | | RVTITCRASQGIRNDLG | |
| | | PGKGLEWVSVISGGGSFTSY | | | WYQQKPGKAPKLLIYAA | |
| | | ADSVKGRFTISRDNSNNTLY | | | SSLQSGVPSRFSGSGSG | |
| | | LQMSSLRAEDTAFYYCARMP | | | TDFTLTISSLQPEDFAT | |
| | | LNSPHDCWGQGTLVTVSS | | | YYCLQDYNYSLTFGGGT | |
| | | | | | KVEIR | |
| TMEB565 | TMEH396 | QVQLVQSGAEVKKPGSSVKV | 589 | TMEL111 | EIVLTQSPGTLSLSPGE | 31 |
| | | SCKASGGTFSSYYISWVRQA | | | RATLSCRASQSVATYYL | |
| | | PGQGLEWMGGIIPISGRANY | | | AWYQQKPGQAPRLLIYG | |
| | | AQKFQGRVTITADESTSTAY | | | ASSRATGIPDRFSGSGS | |
| | | MELSSLRSEDTAVYYCARDG | | | GTDFTLTISRLEPEDFA | |
| | | YSSGRSTTYAFDYWGQGTLV | | | VYYCQQYGYNPITFGQG | |
| | | TVSS | | | TKVEIK | |
| TMEB762 | TMEH459 | EVQLLESGGGLVQPGGSLRL | 604 | DL3L129 | DIQMTQSPSSLSASVGD | 607 |
| | | SCAASGFTFSSYSMSWVRQA | | | RVTITCRASQGIRNDLG | |
| | | PGKGLEWVSVISGSGGFTDY | | | WYQQKPGKAPKLLIYAA | |
| | | ADSVKGRFTISRDNSKNTLY | | | SSLQSGVPSRFSGSGSG | |
| | | LQMNSLRAEDTAVYYCARMP | | | TDFTLTISSLQPEDFAT | |
| | | LNSPHDYWGQGTLVTVSS | | | YYCLQDYNYPLTFGGGT | |
| | | | | | KEVIK | |
| TMEB757 | TMEH460 | EVQLLESGGGLVQPGGSLRL | 612 | B76L85 | AIQMTQSPSSLSASVGD | 613 |
| | | SCAASGFTFSSYSMSWVRQA | | | RVTITCRASQGIRNDLG | |
| | | PGKGLEWVSVISGSGGFTDY | | | WYQQKPGKAPKLLIYAA | |
| | | ADSVKGRFTISRDNSKNTLY | | | SSLQSGVPSRFSGSGSG | |
| | | LHMNSLRAEDTAVYYCARMP | | | TDFTLTISSLQPEDFAT | |
| | | LNSPHDYWGQGTLVTVSS | | | YYCLQDYNYPLTFGGGT | |
| | | | | | KVEIK | |

TABLE 65

| | | | HC protein SEQ | LC protein SEQ |
|---|---|---|---|---|
| Antibody | VH name | VL name | ID NO: | ID NO: |
| TMEB675 | TMEH411 | TMEL127 | 32 | 35 |
| TMEB570 | TMEH396 | TMEL112 | 33 | 36 |
| TMEB674 | TMEH410 | TMEL126 | 34 | 37 |
| TMEB565 | TMEH396 | TMEL111 | 33 | 38 |
| TMEB762 | TMEH459 | DL3L129 | 614 | 615 |
| TMEB757 | TMEH460 | B76L85 | 616 | 617 |

TABLE 66

| HC protein | |
|---|---|
| SEQ ID NO:) | HC amino acid sequence |
| 32 | evqllesggglvqrggslrpscaasgftfssysmsw |
| (TMEB675 | vrqapgkglewvsvisgsggftdyadsvkgrftisr |
| HC) | dnskntlylhmnslraedtavyycarmplnsphdyw |
| | gqgtlvtvssastkgpsvfplapcsrstsestaalg |
| | clvkdyfpepvtvswnsgaltsgvhtfpavlqssgl |
| | yslssvvtvpssslgtktytcnvdhkpsntkvdkrv |
| | eskygppcppcpapeaaggpsvflfppkpkdtlmis |
| | rtpevtcvvvdvsqedpevqfnwyvdgvevhnaktk |
| | preeqfnstyrvvsyltvlhqdwlngkeykckvsnk |
| | glpssiektiskakgqprepqvytlppsqeemtknq |
| | vsltclvkgfypsdiavewesngqpennykttppvl |
| | dsdgsfflysrltvdksrwqegnvfscsvmhealhn |
| | hytqkslslslgk |
| 33 | qvqlvqsgaevkkpgssvkvsckasggtfssyyisw |
| (TMEB570, | vrqapgqglewmggiipisgranyaqkfqgrvtita |
| TMEB565 | deststaymelsslrsedtavyycardgyssgrstt |
| HC) | yafdywgqgtlvtvssastkgpsvfplapcsrstse |
| | staalgclvkdyfpepvtvswnsgaltsgvhtfpav |
| | lqssglyslssvvtvpssslgtktytcnvdhkpsnt |
| | kvdkrveskygppcppcpapeaaggpsvflfppkpk |
| | dtlmisrtpevtcvvvdvsqedpevqfnwyvdgvev |
| | hnaktkpreeqfnstyrvvsyltvlhqdwlngkeyk |
| | ckvsnkglpssiektiskakgqprepqvytlppsqe |
| | emtknqvsltclvkgfypsdiavewesngqpennyk |
| | ttppvldsdgsfflysrltvdksrwqegnvfscsvm |
| | healhnhytqkslslslgk |
| 34 | evqllesggglvqppggslrlscaasgftfssysms |
| (TMEB674 | wvrqapgkglewvsvisgggsftsyadsvkgrftis |
| HC) | rdnsnntlylqmsslraedtafyycarmplnsphdc |
| | wgqgtlvtvssastkgpsvfplapcsrstsestaal |
| | gclvkdyfpepvtvswnsgaltsgvhtfpavlqssg |
| | lyslssvvtvpssslgtktytcnvdhkpsntkvdkr |
| | veskygppcppcpapeaaggpsvflfppkpkdtlmi |
| | srtpevtcvvvdvsqedpevqfnwyvdgvevhnakt |
| | kpreeqfnstyrvvsyltvlhqdwlngkeykckvsn |
| | kglpssiektiskakgqprepqvytlppsqeemtkn |
| | qvsltclvkgfypsdiavewesngqpennykttppv |
| | ldsdgsfflysrltvdksrwqegnvfscsvmhealh |
| | nhytqkslslslgk |
| 614 | evqllesggglvqpggslrlscaasgftfssysmsw |
| (TMEB762 | vrqapgkglewvsvisgsggftdyadsvkgrftisr |
| HC) | dnskntlylqmnslraedtavyycarmplnsphdyw |
| | gqgtlvtvssastkgpsvfplapcsrstsestaalg |
| | clvkdyfpepvtvswnsgaltsgvhtfpavlqssgl |
| | yslssvvtvpssslgtktytcnvdhkpsntkvdkrv |
| | eskygppcppcpapeaaggpsvflfppkpkdtlmis |
| | rtpevtcvvvdvsqedpevqfnwyvdgvevhnaktk |
| | preeqfnstyrvvsyltvlhqdwlngkeykckvsnk |
| | glpssiektiskakgqprepqvytlppsqeemtknq |
| | vsltclvkgfypsdiavewesngqpennykttppvl |
| | dsdgsfflysrltvdksrwqegnvfscsvmhealhn |
| | hytqkslslslgk |
| 616 | evqllesggglvqpggslrlscaasgftfssysmsw |
| (TMEB757 | vrqapgkglewvsvisgsggftdyadsvkgrftisr |
| HC) | dnskntlylhmnslraedtavyycarmplnsphdyw |
| | gqgtlvtvssastkgpsvfplapcsrstsestaalg |
| | clvkdyfpepvtvswnsgaltsgvhtfpavlqssgl |
| | yslssvvtvpssslgtktytcnvdhkpsntkvdkrv |
| | eskygppcppcpapeaaggpsvflfppkpkdtlmis |
| | rtpevtcvvvdvsqedpevqfnwyvdgvevhnaktk |
| | preeqfnstyrvvsyltvlhqdwlngkeykckvsnk |
| | glpssiektiskakgqprepqvytlppsqeemtknq |
| | vsltclvkgfypsdiavewesngqpennykttppvl |
| | dsdgsfflysrltvdksrwqegnvfscsvmhealhn |
| | hytqkslslslgk |

TABLE 67

| LC protien | |
|---|---|
| SEQ ID NO: | LC amino acid sequence |
| 35 | aiqmtqspsslsasvgdrvtitcrasqgirndlgwyq |
| (TMEB67 | qkpgkapklliyaasslqsgvpsrfsgsgsgtdftlt |
| 5 LC) | isslqpedfatyyclqdynyaltfgggtkveikrtva |
| | apsvfifppsdeqlksgtasvvcllnnfypreakvqw |
| | kvdnalqsgnsqesvteqdskdstyslsstltlskad |
| | yekhkvyacevthqglsspvtksfnrgec |
| 36 | eivltqspgtlslspgeratlscrasqsvstyylawy |
| (TMEB57 | qqkpgqpaprlliygasyratgipdrfsgsgsgtdft |
| 0 LC) | ltisrlepedfavyycqqyghspitfgqgtkveikrt |
| | vaapsvfifppsdeqlksgtasvvcllnnfypreakv |
| | qwkvdnalqsgnsqesvteqdskdstyslsstltlsk |
| | adyekhkvyacevthqglsspvtksfnrgec |
| 37 | aiqmtqspsslsasvgdrvtitcrasqgirndlgwyq |
| (TMEB67 | qkpgkapklliyaallsqsgvpsrfsgsgsgtdftlt |
| 4 LC) | isslqpedfatyyclqdynysltfgggtkveirrtva |
| | apsvfifppsdeqlksgtasvvcllnnfypreakvqw |
| | kvdnalqsgnsqesvteqdskdstyslsstltlskad |
| | yekhkvyacevthqglsspvtksfnrgec |
| 38 | eivltqspgtlslspgeratlscrasqsvatyylawy |
| (TMEB56 | qqkpgqaprlliygassratgipdrfsgsgsgtdftl |
| 5 LC) | tisrlepedfavyycqqygynpitfgqgtkveikrtv |
| | aapsvfifppsdeqlksgtasvvcllnnfypreakvq |
| | wkvdnalqsgnsqesvteqdskdstyslsstltlska |
| | dyekhkvyacevthqglsspvtksfnrgec |
| 615 | diqmtqspsslsasvgdrvtitcrasqgirndlgwyq |
| (TMEB76 | qkpgkapklliyaasslqsgvpsrfsgsgsgtdftlt |
| 2 LC) | isslqpedfatyyclqdynypltfgggtkveikrtva |
| | apsvfifppsdeqlksgtasvvcllnnfypreakvqw |
| | vdnalqsgnsqesvteqdskdstyslsstltlskady |
| | ekhkvyacevthqglsspvtksfnrgec |
| 617 | aikmtqspsslsasvgdrvtitcrasqgirndlgwyq |
| (TMEB75 | qkpgkapklliyaasslqsgvpsrfsgsgsgtdftlt |
| 7 LC) | isslqpedfatyyclqdynypltfgggtkveikrtva |
| | apsvfifppsdeqlksgtasvvcllnnfypreakvqw |
| | kvdnalqsgnsqesvteqdskdstyslsstltlskad |
| | yekhkvyacevthqglsspvtksfnrgec |

TABLE 68

| | VH | VL | HC | LC |
|---|---|---|---|---|
| | cDNA | cDNA | cDNA | cDNA |
| | SEQ ID | SEQ ID | SEQ ID | SEQ ID |
| Antibody | NO: | NO: | NO: | NO: |
| TMEB675 | 39 | 42 | 46 | 49 |
| TMEB570 | 40 | 43 | 47 | 50 |
| TMEB674 | 41 | 44 | 48 | 51 |
| TMEB565 | 40 | 45 | 47 | 590 |
| TMEB762 | 618 | 619 | 620 | 621 |
| TMEB757 | 622 | 623 | 624 | 625 |

(TMEB675 VH cDNA)
SEQ ID NO: 39
Gaggtgcagctgctggaaageggcggaggcctggtgcagagaggaggaagcctgagacccagctgtgccgccagcggcttcaccttc
agcagctacagcatgagctgggtcaggcaggcccctggcaaaggactggagtgggtgagcgtgattagcggcagcggcggcttcacc
gattacgccgacagcgtgaagggcaggttcaccatcagcagggacaatagcaagaacaccctgtacctgcacatgaacagcctgagg
gccgaggacaccgccgtgtactactgcgccaggatgcccctgaacagccctcacgactactggggccagggaaccctggtgaccgtg
tccagc
(TMEB570, TMEB565 VH cDNA)
SEQ ID NO: 40
Caggtgcagctggtgcagagcggcgcggaagtgaaaaaaccgggcagcagcgtgaaagtgagctgcaaagcgagcggcggcaccttc
agctcctattacattagctgggtgcgccaggcgccgggccagggcctggaatggatgggtggcattatcccaatcagtgggcgtgct
aattatgcgcagaaatttcagggccgcgtgaccattaccgctgatgaaagcaccagcaccgcgtatatggaactgagcagcctgcgc
agcgaagataccgcggtgtattattgcgcgcgcgacggctacagtagtggacgtagcacaacatacgcatttgactattggggccag
ggcaccctggtgaccgtgtcgagt
(TMEB674 VH cDNA)
SEQ ID NO: 41
Gaagtgcagctgctggagagcggaggaggactggtgcagcctcctggcggaagcctgagactgagctgcgccgctagcggcttcacc
ttcagcagctacagcatgagctgggtgagacaggctcctggcaagggcctggagtgggtgagcgtgatcagcggcggaggcagcttt
accagctacgccgacagcgtgaagggcaggttcaccatcagcagggacaacagcaacaacaccctgtacctgcagatgagcagcctg
agggccgaggacaccgccttctactactgcgccaggatgcccctgaacagcccccatgactgctggggacagggcaccctggtgacc
gtgagcagc
(TMEB675 VL cDNA)
SEQ ID NO: 42
Gccatccagatgacccagagccctagcagcctgagcgctagcgtgggcgacagggtgaccatcacctgcagggccagccagggcatc
agaaacgacctgggctggtaccagcagaagcccggcaaggcccccaagctgctgatctacgccgccagcagcctgcagagcggagtg
cctagcaggttcagcggaagcggcagcggcaccgacttcaccctgaccatcagcagcctgcagcccgaggacttcgccacctactac
tgcctgcaggactacaactacgccctgacattcggcggcggcaccaaggtggagatcaag
(TMEB570 VL cDNA)
SEQ ID NO: 43
Gaaattgtgctgacccagagcccgggcaccctgagcctgagcccgggcgaacgcgcgaccctgagctgccgcgcgagccagagcgtt
tccacatactacctggcgtggtatcagcagaaaccgggccaggcgccgcgcctgctgatttacggtgcctcctatcgcgcgaccggc
attccggatcgctttagcggcagcggttccggcaccgattttaccctgaccattagccgcctggaaccggaagattttgcggtgtat
tattgccagcagtacggtcacagcccgattacttttggccagggcaccaaagtggaaatcaaa
(TMEB674 VL cDNA)
SEQ ID NO: 44
Gccatccagatgacccagagccctagcagcctgagcgctagcgtgggcgacagggtgaccatcacctgcagggccagccagggcatc
aggaacgacctgggctggtaccagcagaagcccggcaaggcccccaagctgctgatctacgccgccagcagcctgcagagcggagtg
cctagcaggttcagcggcagcggaagcggcaccgacttcaccctgaccatctccagcctgcagcccgaggacttcgccacctactac
tgcctgcaggactacaactacagcctgaccttcggcggcggcaccaaggtggagatcagg
(TMEB565 VL cDNA)
SEQ ID NO: 45
Gaaattgtgctgacccagagcccgggcaccctgagcctgagcccgggcgaacgcgcgaccctgagctgccgcgcgagccagagcgtt
gccacctattatcttgcgtggtatcagcagaaaccgggccaggcgccgcgcctgctgatttacggtgcatcctcccgtgcgaccggc
attccggatcgctttagcggcagcggttccggcaccgattttaccctgaccattagccgcctggaaccggaagattttgcggtgtat
tattgccagcagtacggctataacccaattacctttggccagggcaccaaagtggaaatcaaa
(TMEB675 HC cDNA)
SEQ ID NO: 46
gaggtgcagctgctggaaagcggcggaggcctggtgcagagaggaggaagcctgagacccagctgtgccgccagcggcttcaccttc
agcagctacagcatgagctgggtcaggcaggcccctggcaaaggactggagtgggtgagcgtgattagcggcagcggcggcttcacc
gattacgccgacagcgtgaagggcaggttcaccatcagcagggacaatagcaagaacaccctgtacctgcacatgaacagcctgagg
gccgaggacaccgccgtgtactactgcgccaggatgcccctgaacagccctcacgactactggggccagggaaccctggtgaccgtg
tccagcgcttccaccaagggcccatccgtcttccccctggcgccctgctccaggagcacctccgagagcacagccgccctgggctgc
ctggtcaaggactacttccccgaaccggtgacggtgtcgtggaactcaggcgccctgaccagcggcgtgcacaccttcccggctgtc
ctacagtcctcaggactctactccctcagcagcgtggtgaccgtgccctccagcagcttgggcacgaaaacctacacctgcaacgta
gatcacaagcccagcaacaccaaggtggacaagagagttgagtccaaatatggtcccccatgcccaccatgcccagcacctgaggcc
gccgggggaccatcagtcttcctgttccccccaaaacccaaggacactctcatgatctcccggacccctgaggtcacgtgcgtggtg
gtggacgtgagccaggaagaccccgaggtccagttcaactggtacgtggatggcgtggaggtgcataatgccaagacaaagccgcgg
gaggagcagttcaacagcacgtaccgtgtggtcagcgtcctcaccgtcctgcaccaggactggctgaacggcaaggagtacaagtgc
aaggtctccaacaaaggcctcccgtcctccatcgagaaaaccatctccaaagccaaagggcagccccgagagccacaggtgtacacc
ctgcccccatcccaggaggagatgaccaagaaccaggtcagcctgacctgcctggtcaaaggcttctaccccagcgacatcgccgtg
gagtgggagagcaatgggcagccggagaacaactacaagaccacgcctcccgtgctggactccgacggctccttcttcctctacagc
aggctaaccgtggacaagagcaggtggcaggaggggaatgtcttctcatgctccgtgatgcatgaggctctgcacaaccactacaca
cagaagagcctctccctgtctctgggtaaa
(TMEB570, TMEB565 HC cDNA)
SEQ ID NO: 47
caggtgcagctggtgcagagcggcgcggaagtgaaaaaaccgggcagcagcgtgaaagtgagctgcaaagcgagcggcggcaccttc
agctcctattacattagctgggtgcgccaggcgccgggccagggcctggaatggatgggtggcattatcccaatcagtgggcgtgct
aattatgcgcagaaatttcagggccgcgtgaccattaccgctgatgaaagcaccagcaccgcgtatatggaactgagcagcctgcgc
agcgaagataccgcggtgtattattgcgcgcgcgacggctacagtagtggacgtagcacaacatacgcatttgactattggggccag
ggcaccctggtgaccgtgtcgagtgcttccaccaagggcccatccgtcttccccctggcgccctgctccaggagcacctccgagagc
acagccgccctgggctgcctggtcaaggactacttccccgaaccggtgacggtgtcgtggaactcaggcgccctgaccagcggcgtg
cacaccttcccggctgtcctacagtcctcaggactctactccctcagcagcgtggtgaccgtgccctccagcagcttgggcacgaaa
acctacacctgcaacgtagatcacaagcccagcaacaccaaggtggacaagagagttgagtccaaatatggtcccccatgcccacca
tgcccagcacctgaggccgccgggggaccatcagtcttcctgttccccccaaaacccaaggacactctcatgatctcccggacccct
gaggtcacgtgcgtggtggtggacgtgagccaggaagaccccgaggtccagttcaactggtacgtggatggcgtggaggtgcataat
gccaagacaaagccgcgggaggagcagttcaacagcacgtaccgtgtggtcagcgtcctcaccgtcctgcaccaggactggctgaac
ggcaaggagtacaagtgcaaggtctccaacaaaggcctcccgtcctccatcgagaaaaccatctccaaagccaaagggcagccccga
gagccacaggtgtacaccctgcccccatcccaggaggagatgaccaagaaccaggtcagcctgacctgcctggtcaaaggcttctac
cccagcgacatcgccgtggagtgggagagcaatgggcagccggagaacaactacaagaccacgcctcccgtgctggactccgacggc
tccttcttcctctacagcaggctaaccgtggacaagagcaggtggcaggaggggaatgtcttctcatgctccgtgatgcatgaggct
ctgcacaaccactacacacagaagagcctctccctgtctctgggtaaa
(TMEB674 HC cDNA)
SEQ ID NO: 48
gaagtgcagctgctggagagcggaggaggactggtgcagcctcctggcggaagcctgagactgagctgcgccgctagcggatcacct
tcagcagctacagcatgagctgggtgagacaggctcctggcaagggcctggagtgggtgagcgtgatcagcggcggaggcagattac
cagctacgccgacagcgtgaagggcaggttcaccatcagcagggacaacagcaacaacaccctgtacctgcagatgagcagcctgag
ggccgaggacaccgccttctactactgcgccaggatgcccctgaacagcccccatgactgctggggacagggcaccctggtgaccgt
gagcagcgcttccaccaagggcccatccgtcttccccctggcgccctgctccaggagcacctccgagagcacagccgccctgggctg
cctggtcaaggactacttccccgaaccggtgacggtgtcgtggaactcaggcgccctgaccagcggcgtgcacaccttcccggctgt
cctacagtcctcaggactctactccctcagcagcgtggtgaccgtgccctccagcagcttgggcacgaaaacctacacctgcaacgt
agatcacaagcccagcaacaccaaggtggacaagagagttgagtccaaatatggtcccccatgcccaccatgcccagcacctgaggc
cgccgggggaccatcagtcttcctgttccccccaaaacccaaggacactctcatgatctcccggacccctgaggtcacgtgcgtggt
ggtggacgtgagccaggaagaccccgaggtccagttcaactggtacgtggatggcgtggaggtgcataatgccaagacaaagccgcg
ggaggagcagttcaacagcacgtaccgtgtggtcagcgtcctcaccgtcctgcaccaggactggctgaacggcaaggagtacaagtg
caaggtctccaacaaaggcctcccgtcctccatcgagaaaaccatctccaaagccaaagggcagccccgagagccacaggtgtacac
cctgcccccatcccaggaggagatgaccaagaaccaggtcagcctgacctgcctggtcaaaggcttctaccccagcgacatcgccgt
ggagtgggagagcaatgggcagccggagaacaactacaagaccacgcctcccgtgctggactccgacggctccttcttcctctacag
caggctaaccgtggacaagagcaggtggcaggaggggaatgtcttctcatgctccgtgatgcatgaggctctgcacaaccactacac
acagaagagcctctccctgtctctgggtaaa
(TMEB675 LC cDNA)
SEQ ID NO: 49
Gccatccagatgacccagagccctagcagcctgagcgctagcgtgggcgacagggtgaccatcacctgcagggccagccagggcatc
agaaacgacctgggctggtaccagcagaagcccggcaaggcccccaagctgctgatctacgccgccagcagcctgcagagcggagtg
cctagcaggttcagcggaagcggcagcggcaccgacttcaccctgaccatcagcagcctgcagcccgaggacttcgccacctactac
tgcctgcaggactacaactacgccctgacattcggcggcggcaccaaggtggagatcaagcgtacggtggctgcaccatctgtcttc
atcttcccgccatctgatgagcagttgaaatctggaactgcctctgttgtgtgcctgctgaataacttctatcccagagaggccaaa
gtacagtggaaggtggataacgccctccaatcgggtaactcccaggagagtgtcacagagcaggacagcaaggacagcacctacagc
ctcagcagcaccctgacgctgagcaaagcagactacgagaaacacaaagtctacgcctgcgaagtcacccatcagggcctgagctcg
cccgtcacaaagagcttcaacaggggagagtgt
(TMEB570 LC cDNA)
SEQ ID NO: 50
Gaaattgtgctgacccagagcccgggcaccctgagcctgagcccgggcgaacgcgcgaccctgagctgccgcgcgagccagagcgtt
tccacatactacctggcgtggtatcagcagaaaccgggccaggcgccgcgcctgctgatttacggtgcctcctatcgcgcgaccggc
attccggatcgctttagcggcagcggttccggcaccgattttaccctgaccattagccgcctggaaccggaagattttgcggtgtat
tattgccagcagtacggtcacagcccgattacttttggccagggcaccaaagtggaaatcaaacgtacggtggctgcaccatctgtc
ttcatcttcccgccatctgatgagcagttgaaatctggaactgcctctgttgtgtgcctgctgaataacttctatcccagagaggcc
aaagtacagtggaaggtggataacgccctccaatcgggtaactcccaggagagtgtcacagagcaggacagcaaggacagcacctac
agcctcagcagcaccctgacgctgagcaaagcagactacgagaaacacaaagtctacgcctgcgaagtcacccatcagggcctgagc
tcgcccgtcacaaagagcttcaacaggggagagtgt
(TMEB674 LC cDNA)
SEQ ID NO: 51
Gccatccagatgacccagagccctagcagcctgagcgctagcgtgggcgacagggtgaccatcacctgcagggccagccagggcatc
aggaacgacctgggctggtaccagcagaagcccggcaaggcccccaagctgctgatctacgccgccagcagcctgcagagcggagtg
cctagcaggttcagcggcagcggaagcggcaccgacttcaccctgaccatctccagcctgcagcccgaggacttcgccacctactac
tgcctgcaggactacaactacagcctgaccttcggcggcggcaccaaggtggagatcaggcgtacggtggctgcaccatctgtcttc
atcttcccgccatctgatgagcagttgaaatctggaactgcctctgttgtgtgcctgctgaataacttctatcccagagaggccaaa
gtacagtggaaggtggataacgccctccaatcgggtaactcccaggagagtgtcacagagcaggacagcaaggacagcacctacagc
ctcagcagcaccctgacgctgagcaaagcagactacgagaaacacaaagtctacgcctgcgaagtcacccatcagggcctgagctcg
cccgtcacaaagagcttcaacaggggagagtgt
(TMEB565 LC cDNA)
SEQ ID NO: 590
Gaaattgtgctgacccagagcccgggcaccctgagcctgagcccgggcgaacgcgcgaccctgagctgccgcgcgagccagagcgtt
gccacctattatcttgcgtggtatcagcagaaaccgggccaggcgccgcgcctgctgatttacggtgcatcctcccgtgcgaccggc
attccggatcgctttagcggcagcggttccggcaccgattttaccctgaccattagccgcctggaaccggaagattttgcggtgtat
tattgccagcagtacggctataacccaattacctttggccagggcaccaaagtggaaatcaaacgtacggtggctgcaccatctgtc
ttcatcttcccgccatctgatgagcagttgaaatctggaactgcctctgttgtgtgcctgctgaataacttctatcccagagaggcc
aaagtacagtggaaggtggataacgccctccaatcgggtaactcccaggagagtgtcacagagcaggacagcaaggacagcacctac
agcctcagcagcaccctgacgctgagcaaagcagactacgagaaacacaaagtctacgcctgcgaagtcacccatcagggcctgagc
tcgcccgtcacaaagagcttcaacaggggagagtgt
(TMEB762 VH cDNA)
SEQ ID NO: 618
gaggtgcagctgctggaaagcggcggaggcctggtgcagcccggaggaagcctgagactcagctgtgccgccagcggcttcaccttc
agcagctacagcatgagctgggtcaggcaggcccctggcaaaggactggagtgggtgagcgtgattagcggcagcggcggcttcacc
gattacgccgacagcgtgaagggcaggttcaccatcagcagggacaatagcaagaacaccctgtacctgcagatgaacagcctgagg
gccgaggacaccgccgtgtactactgcgccaggatgcccctgaacagccctcacgactactggggccagggaaccctggtgaccgtg
tccagc
(TMEB762 VL cDNA)
SEQ ID NO: 619
gacatccagatgacccagagccctagcagcctgagcgctagcgtgggcgacagggtgaccatcacctgcagggccagccagggcatc
agaaacgacctgggctggtaccagcagaagcccggcaaggcccccaagctgctgatctacgccgccagcagcctgcagagcggagtg
cctagcaggttcagcggaagcggcagcggcaccgacttcaccctgaccatcagcagcctgcagcccgaggacttcgccacctactac
tgcctgcaggactacaactaccccctgacattcggcggcggcaccaaggtggagatcaag
(TMEB762 HC cDNA)
SEQ ID NO: 620
gaggtgcagctgctggaaagcggcggaggcctggtgcagcccggaggaagcctgagactcagctgtgccgccagcggcttcaccttc
agcagctacagcatgagctgggtcaggcaggcccctggcaaaggactggagtgggtgagcgtgattagcggcagcggcggcttcacc
gattacgccgacagcgtgaagggcaggttcaccatcagcagggacaatagcaagaacaccctgtacctgcagatgaacagcctgagg
gccgaggacaccgccgtgtactactgcgccaggatgcccctgaacagccctcacgactactggggccagggaaccctggtgaccgtg
tccagcgcttccaccaagggcccatccgtcttccccctggcgccctgctccaggagcacctccgagagcacagccgccctgggctgc
ctggtcaaggactacttccccgaaccggtgacggtgtcgtggaactcaggcgccctgaccagcggcgtgcacaccttcccggctgtc
ctacagtcctcaggactctactccctcagcagcgtggtgaccgtgccctccagcagcttgggcacgaaaacctacacttgcaacgta
gatcacaagcccagcaacaccaaggtggacaagagagttgagtccaaatatggtcccccatgcccaccatgcccagcacctgaggcc
gccgggggaccatcagtcttcctgttccccccaaaacccaaggacactctcatgatctcccggacccctgaggtcacgtgcgtggtg
gtggacgtgagccaggaagaccccgaggtccagttcaactggtacgtggatggcgtggaggtgcataatgccaagacaaagccgcgg
gaggagcagttcaacagcacgtaccgtgtggtcagcgtcctcaccgtcctgcaccaggactggctgaacggcaaggagtacaagtgc
aaggtctccaacaaaggcctcccgtcctccatcgagaaaaccatctccaaagccaaagggcagccccgagagccacaggtgtacacc
ctgcccccatcccaggaggagatgaccaagaaccaggtcagcctgacctgcctggtcaaaggcttctaccccagcgacatcgccgtg
gagtgggagagcaatgggcagccggagaacaactacaagaccacgcctcccgtgctggactccgacggctccttcttcctctacagc
aggctaaccgtggacaagagcagatggcaggaggggaatgtcttctcatgctccgtgatgcatgaggctctgcacaaccactacaca
cagaagagcctctccctgtctctgggtaaa
(TMEB762 LC cDNA)
SEQ ID NO: 621
gacatccagatgacccagagccctagcagcctgagcgctagcgtgggcgacagggtgaccatcacctgcagggccagccagggcatc
agaaacgacctgggctggtaccagcagaagcccggcaaggcccccaagctgctgatctacgccgccagcagcctgcagagcggagtg
cctagcaggttcagcggaagcggcagcggcaccgacttcaccctgaccatcagcagcctgcagcccgaggacttcgccacctactac
tgcctgcaggactacaactaccccctgacattcggcggcggcaccaaggtggagatcaagcgtacggtggctgcaccatctgtcttc
atcttcccgccatctgatgagcagttgaaatctggaactgcctctgttgtgtgcctgctgaataacttctatcccagagaggccaaa
gtacagtggaaggtggataacgccctccaatcgggtaactcccaggagagtgtcacagagcaggacagcaaggacagcacctacagc
ctcagcagcaccctgacgctgagcaaagcagactacgagaaacacaaagtctacgcctgcgaagtcacccatcagggcctgagctcg
cccgtcacaaagagcttcaacaggggagagtgttag
(TMEB757 VH cDNA)
SEQ ID NO: 622
gaggtgcagctgctggaaagcggcggaggcctggtgcagcccggaggaagcctgagactcagctgtgccgccagcggcttcaccttc
agcagctacagcatgagctgggtcaggcaggcccctggcaaaggactggagtgggtgagcgtgattagcggcagcggcggcttcacc
gattacgccgacagcgtgaagggcaggttcaccatcagcagggacaatagcaagaacaccctgtacctgcacatgaacagcctgagg
gccgaggacaccgccgtgtactactgcgccaggatgcccctgaacagccctcacgactactggggccagggaaccctggtgaccgtg
tccagc
(TMEB757 VL cDNA)
SEQ ID NO: 623
gccatccagatgacccagagccctagcagcctgagcgctagcgtgggcgacagggtgaccatcacctgcagggccagccagggcatc
agaaacgacctgggctggtaccagcagaagcccggcaaggcccccaagctgctgatctacgccgccagcagcctgcagagcggagtg
cctagcaggttcagcggaagcggcagcggcaccgacttcaccctgaccatcagcagcctgcagcccgaggacttcgccacctactac
tgcctgcaggactacaactaccccctgacattcggcggcggcaccaaggtggagatcaag
(TMEB757 HC cDNA)
SEQ ID NO: 624
gaggtgcagctgctggaaagcggcggaggcctggtgcagcccggaggaagcctgagactcagctgtgccgccagcggcttcaccttc
agcagctacagcatgagctgggtcaggcaggcccctggcaaaggactggagtgggtgagcgtgattagcggcagcggcggcttcacc
gattacgccgacagcgtgaagggcaggttcaccatcagcagggacaatagcaagaacaccctgtacctgcacatgaacagcctgagg
gccgaggacaccgccgtgtactactgcgccaggatgcccctgaacagccctcacgactactggggccagggaaccctggtgaccgtg
tccagcgcttccaccaagggcccatccgtcttccccctggcgccctgctccaggagcacctccgagagcacagccgccctgggctgc
ctggtcaaggactacttccccgaaccggtgacggtgtcgtggaactcaggcgccctgaccagcggcgtgcacaccttcccggctgtc
ctacagtcctcaggactctactccctcagcagcgtggtgaccgtgccctccagcagcttgggcacgaaaacctacacttgcaacgta
gatcacaagcccagcaacaccaaggtggacaagagagttgagtccaaatatggtcccccatgcccaccatgcccagcacctgaggcc
gccgggggaccatcagtcttcctgttccccccaaaacccaaggacactctcatgatctcccggacccctgaggtcacgtgcgtggtg
gtggacgtgagccaggaagaccccgaggtccagttcaactggtacgtggatggcgtggaggtgcataatgccaagacaaagccgcgg
gaggagcagttcaacagcacgtaccgtgtggtcagcgtcctcaccgtcctgcaccaggactggctgaacggcaaggagtacaagtgc
aaggtctccaacaaaggcctcccgtcctccatcgagaaaaccatctccaaagccaaagggcagccccgagagccacaggtgtacacc
ctgcccccatcccaggaggagatgaccaagaaccaggtcagcctgacctgcctggtcaaaggcttctaccccagcgacatcgccgtg
gagtgggagagcaatgggcagccggagaacaactacaagaccacgcctcccgtgctggactccgacggctccttcttcctctacagc
aggctaaccgtggacaagagcagatggcaggaggggaatgtcttctcatgctccgtgatgcatgaggctctgcacaaccactacaca
cagaagagcctctccctgtctctgggtaaa
(TMEB757 LC cDNA)
SEQ ID NO: 625
gccatccagatgacccagagccctagcagcctgagcgctagcgtgggcgacagggtgaccatcacctgcagggccagccagggcatc
agaaacgacctgggctggtaccagcagaagcccggcaaggcccccaagctgctgatctacgccgccagcagcctgcagagcggagtg
cctagcaggttcagcggaagcggcagcggcaccgacttcaccctgaccatcagcagcctgcagcccgaggacttcgccacctactac
tgcctgcaggactacaactaccccctgacattcggcggcggcaccaaggtggagatcaagcgtacggtggctgcaccatctgtcttc
atcttcccgccatctgatgagcagttgaaatctggaactgcctctgttgtgtgcctgctgaataacttctatcccagagaggccaaa
gtacagtggaaggtggataacgccctccaatcgggtaactcccaggagagtgtcacagagcaggacagcaaggacagcacctacagc
ctcagcagcaccctgacgctgagcaaagcagactacgagaaacacaaagtctacgcctgcgaagtcacccatcagggcctgagctcg
cccgtcacaaagagcttcaacaggggagagtgttag

The frameworks for the select anti-TMEFF2 antibodies are shown in Table 69.

TABLE 69

| | | VH | | VL |
|---|---|---|---|---|
| | VH | framework | VL | framework |
| Antibody | framework | SEQ ID NO: | framework | SEQ ID NO: |
| TMEB675 | VH3_3-23 | 53 | VKI_L11 | 55 |
| TMEB570 | VH1_1-69 | 54 | VKIII_A27 | 591 |
| TMEB674 | VH3_3-23 | 53 | VKI_L11 | 55 |
| TMEB565 | VH1_1-69 | 54 | VKI_L11 | 55 |
| TMEB762 | VH3_3-23 | 53 | VKI_L11 | 55 |
| TMEB757 | VH3_3-23 | 53 | VKI_L11 | 55 |

(VH3_3-23 framework)
SEQ ID NO: 53
EVQLLESGGGLVQPGGSLRLSCAASGFTFSSYAMSWVRQAPGKGLEWVS
AISGSGGSTYYADSVKGRFTISRDNSKNTLYLQMNSLRAEDTAVYYCAK
WGQGTLVTVSS
(VH1_1-69 framework)
SEQ ID NO: 54
QVQLVQSGAEVKKPGSSVKVSCKASGGTFSSYAISWVRQAPGQGLEWMG
GIIPIFGTANYAQKFQGRVTITADESTSTAYMELSSLRSEDTAVYYCAR
(VKI_L11 framework)
SEQ ID NO: 55
aiqmtqspsslsasvgdrytitcrasqgirndlgwyqqkpgkapklliy
aasslqsgypsrfsgsgsgtdftltisslqpedfatyyclqdynyp
(VKIII_A27 framework)
SEQ ID NO: 591
EIVLTQSPGTLSLSPGERATLSCRASQSVSSSYLAWYQQKPGQAPRLLI
YGASSRATGIPDRFSGSGSGTDFTLTISRLEPEDFAVYYCQQYGSSP

[0872] 7-5 Epitope Mapping of Anti-TMEFF2 Antibodies

[0873] Epitope mapping of TMEB570 and TMEB675 was done using H/D exchange. TMEW1 (SEQ ID NO: 578) was used as source of TMEFF2 in these assays.

[0874] 10 μg of TMEW1 in 130 μL of control buffer (50 mM phosphate, 100 mM sodium chloride at pH 7.4) was denatured by adding 130 μL of 4 M guanidine hydrochloride, 0.85 M TCEP buffer (final pH was 2.5) and incubating the mixture for 3 min at 10° C. The mixture was then subjected to on-column pepsin/protease XIII digestion using an in-house packed pepsin/protease XIII (w/w, 1:1) column (2.1×30 mm). The resultant peptides were analyzed using an UPLC-MS system comprised of a Waters Acquity UPLC coupled to a Q Exactive™ Hybrid Quadrupole-Orbitrap Mass Spectrometer (Thermo). The peptides were separated on a 50×1 mm C8 column with a 16.5 min gradient from 2-34% solvent B (0.2% formic acid in acetonitrile). Solvent A was 0.2% formic acid in water. The injection valve and pepsin/protease XIII column and their related connecting tubings were kept inside a cooling box maintained at 10° C. The second switching valve, C8 column and their related connecting stainless steel tubings were inside another chilled circulating box maintained at −6° C. Peptide identification was done through searching MS/MS data against the TMEW1 sequence with Mascot. The mass tolerance for the precursor and product ions were 7 ppm ad 0.02 Da, respectively.

[0875] 10 μL of TMEW1 (5 μg) or 10 μL of TMEW1 & TMEB570 or TMEB675 mixture (5 μg:15 μg) was incubated with 120 μL deuterium oxide labeling buffer (50 mM sodium phosphate, 100 mM sodium chloride at pH 7.4) for 0 s, 30 s, 360 s, 3600 s, or 14400 s at 10° C. Hydrogen/deuterium (H/D) exchange at each time point was performed in duplicate. Hydrogen/deuterium exchange was quenched by adding 130 μL of 4 M guanidine hydrochloride, 0.85 M TCEP buffer (final pH was 2.5). Subsequently, the quenched samples were subjected to on column pepsin/protease XIII digestion and LC-MS analysis as described above. The mass spectra were recorded in MS only mode.

[0876] Raw MS data was processed using HDX WorkBench, software for the analysis of H/D exchange MS data (Pascal et al., J. Am. Soc. Mass Spectrom. 2012, 23 (9), 1512-1521). The deuterium levels were calculated using the average mass difference between the deuteriated peptide and its native form (t0). About 97-99% of the protein could be mapped to specific peptides. The deuterium buildup curves showed significant difference in slopes, over exchange time for the peptides.

[0877] TMEB570 epitope: TMEW1 showed a modest reduction in deuterium uptake at residues 235-249 (residue numbering according to SEQ ID NO: 575), e.g. residues HGKCEHSINMQEPSC (SEQ ID NO: 592) within the membrane proximal region were protected from H/D exchange upon binding to TMEB570.

[0878] TMEB675 epitope: TMEW1 showed a modest reduction in deuterium uptake at residues 252-268 (residue numbering according to SEQ ID NO: 575), e.g. residues DAGYTGQHCEKKDYSVL (SEQ ID NO: 600) within the membrane proximal region were protected from H/D/exchange upon binding to TMEB675.

[0879] TMEB570 TMEFF2 epitope residues thus encompassed HGKCEHSINMQEPSC (SEQ ID NO: 592) and TMEB675 epitope residues encompassed DAGYTGQHCEKKDYSVL (SEQ ID NO: 600). Both antibodies bound TMEFF2 within the membrane proximal region.

[0880] 7-6 Generation of Bispecific TMEFF2×CD3 Antibodies

[0881] Select monospecific anti-TMEFF2 and anti-CD3 antibodies (see Example 1-7) were expressed as IgG4/K. F405L and R409K substitutions (EU numbering) were made into the anti-CD3 antibodies while the anti-TMEFF2 antibodies had wild-type IgG4. In addition to position 405 and 409 substitutions, the IgG4 mAbs were engineered to have S228P, F234A and L235A substitution.

[0882] The monospecific antibodies were expressed and purified using standard methods using a Protein A column (HiTrap MabSelect SuRe column). After elution, the pools were dialyzed into D-PBS, pH 7.2.

[0883] Bispecific TMEFF2×CD3 antibodies were generated by combining a monospecific TMEFF2 mAb and a monospecific CD3 mAb in in vitro Fab arm exchange as described in Int. Patent Publ. No. WO2011/131746. Briefly, at about 1-20 mg/ml at a molar ratio of 1:1 of each antibody in PBS, pH 7-7.4 and 75 mM 2-mercaptoethanolamine (2-MEA) was mixed together and incubated at 25-37° C. for 2-6 h, followed by removal of the 2-MEA via dialysis, diafiltration, tangential flow filtration and/or spinned cell filtration using standard methods.

[0884] The bispecific antibodies were further purified after the in vitro Fab-arm exchange using hydrophobic interaction chromatography to minimize residual parental anti-TMEFF2 and anti-CD3 antibodies using standard methods.

[0885] Table 73 and Table 74 show the generated bispecific antibodies.

TABLE 73

| | Parental | | | | | | |
|---|---|---|---|---|---|---|---|
| Bispecific | (TMEFF2 arm/ | | | | | | |
| antibody | CD3 arm) | HCDR1 | HCDR2 | HCDR3 | LCDR1 | LCDR2 | LCDR3 |
| TMCB132 | TMEB675 | 582 | 584 | 587 | 18 | 588 | 22 |
| | CD3B376 | 662 | 663 | 664 | 671 | 673 | 690 |
| TMCB131 | TMEB570 | 583 | 585 | 16 | 19 | 21 | 23 |
| | CD3B376 | 662 | 663 | 664 | 671 | 673 | 690 |
| TMCB150 | TMEB762 | 582 | 584 | 587 | 18 | 588 | 603 |
| | CD3B376 | 662 | 663 | 664 | 671 | 673 | 690 |

TABLE 74

| | Parental | | | | |
|---|---|---|---|---|---|
| Bispecific | (TMEFF2 | | | | |
| antibody | arm/CD3 arm) | VH | VL | HC | LC |
| TMCB132 | TMEB675 | 25 | 28 | 32 | 35 |
| | CD3B376 | 652 | 661 | 640 | 676 |
| TMCB131 | TMEB570 | 589 | 29 | 33 | 36 |
| | CD3B376 | 652 | 661 | 640 | 676 |
| TMCB150 | TMEB762 | 604 | 607 | 614 | 615 |
| | CD3B376 | 652 | 661 | 640 | 676 |

[0886] 7-7 Characterization of Bispecific TMEFF2× CD3 Antibodies

### Purity Analysis by Analytical Ultra Centrifugation (AUC)

[0887] Analytical ultracentrifugation (AUC) allows for the determination of the size, shape, state of aggregation, and reversible interaction of macromolecules in solution. Sedimentation velocity (SV) is an AUC technique that allows for a concentration gradient of a macromolecule to move to the outer radius of the sample holder (cell) as the centrifuge spins. This enables the determination of the sedimentation coefficient which is a factor of the size and shape of a molecule, and it unique to each molecule. Beckman Optima AUC instrument was used for this purpose. The samples were loaded into centrifuge cells equipped with 1.2 cm Beckman centerpieces (rated to 50K rpm) and quartz windows. The cells are assembled and torqued to 130 lbs. The centrifuge cells were placed into an An-50 (8 hole) or An-60 (4 hole) rotor and placed within the AUC chamber. The temperature of the AUC was equilibrated to 20.5° C. for at least one hour with the rotor in the chamber before initiating the run. Runs were performed at 40K rpm for mAb sample with scan count (250 scans), frequency of scan collection (90 seconds), data resolution (10 PM), wavelength at 280 nm. The data were analyzed using the direct boundary fitting software SEDANAL. Purity of the bispecific antibody TMCB150 and its parental mAbs were measured. TMCB150 showed 97.1% monomer, 2.8% dimer monomer and no aggregation, as determined by AUC meeting acceptable criteria for transiently expressed research material for further biophysical characterization. TMEB762 showed 95.5% monomer, 4.5% dimer and no aggregation while CD3B376 showed 97.7% monomer and 2.2% dimer with no aggregation. Aggregate levels of >5% of a minimum two-step purified molecule could have a significant impact on biological activity, solubility, stability and shelf-life.

### Conformational Stability of Anti-TMEFF2/CD3 Bispecific by DSC

[0888] TMCB150 thermal unfolding was determined by DSC (Differential Scanning Calorimetry) that showed an onset of unfolding Tm=52.6° C., the first thermal transition (Tm1) at 61.8° C., second thermal transition (Tm2) at 67.6° C. and third thermal transition (Tm3) at 75.5° C. Based on parental antibodies (anti-TMEFF2, TMEB762 and anti-CD3, CD3B376) thermal transition profile as assessed by DSC before, Tm1 of TMCB150 corresponds to CD3B376 FAB unfolding and Tm3 of TMCB150 corresponds to TMEB762 Fab unfolding transitions.

### Serum Stability

[0889] Serum stability assay is developed to evaluate properties of lead candidates for non-specific or off-target binding to human serum components. This may be predictive of poor pharmacokinetics and bio distribution properties. Binding and stability of TMCB150 is evaluated in both buffer and human serum using a fluorescence-based chromatography method. Bispecific antibody is labeled with Alexa Fluor 488 conjugate (Invitrogen kit according to manufacturer's instructions), incubated in Hepes buffer and human serum (Sigma, cat # H4522) at 4° C. and 37° C. for 2 days and then analysed by SEC-HPLC using Agilent HPLC system equipped with 20 fluorescence detector. Percent aggregate is calculated from the integration of area under the curve of each peak. TMCB150 showed 2.4% aggregation in Hepes buffer at time zero and 2.0% and 1.3% aggregation after two days at 40 and 37° Celcius, respectively. In human serum, TMCB150 showed 1.7% aggregation at time zero and 1.1% aggregation after two days at both 4° and 37° Celcius.

### Non-Specific Binding

[0890] Non-specific binding of the lead molecule to unrelated surfaces is determined by biosensor technology (Biacore 8K). Antibody is passed over SPR surfaces coated with unrelated proteins. If the antibody displays significant binding to these irrelevant surfaces, its predicted to have poor in-vivo properties and exhibit manufacturing challenges. Lead molecule is tested at the final concentration of 1 μM. Irrelevant surfaces include negatively charged protein (Soy Trypsin Inhibitor), positively charged protein (Lysozyme and β-defensin), hydrophobic (Rh-integrin a4b7), human IgG, sticky protein (Rh-CD19). Proper controls are used in this experiment. Lead is flown over two surfaces, one is a blank and the other has a molecule directly immobilized. The response unit (RU) level is determined by subtracting the blank RU from the test surface RU. The RU of TMCB150 and the parental mAbs are given below in the table. A response unit ≥100 predicts high risks for non-specific binding to charged/hydrophobic/IgG surfaces which would create challenges during manufacturing and translate to poor PK properties. None of the antibodies show non-specific binding to irrelevant surfaces predicting low to no risks for manufacturing and in-vivo behavior.

TABLE 75

| | | B-Defensin- | Human | Lyso- | rh-Integrin | rh- |
|---|---|---|---|---|---|---|
| | STI | 3 | IgG | zyme | a4b7 | CD19 |
| TMCB150 | 1.6 | 6.4 | 7.5 | 4.2 | 0 | 3.4 |
| TMEB762 | 0 | 4.1 | 8.4 | 4.6 | 0 | 3.3 |
| CD3B376 | 19.5 | 3.1 | 0.4 | 0.2 | 0 | 0 |

### High Concentration Stability

[0891] Many monoclonal antibodies are formulated at high concentration (≥100 mg/ml) to reduce injection volume to facilitate subcutaneous administration. In addition, all monoclonal antibodies are exposed to transiently high concentrations (≥50 mg/ml) during the purification process. High concentration stability is therefore a critical quality attribute for these molecules. Concentration is performed using centrifugal ultrafiltration devices with 30 kDa MWCO membranes. 5.1 to 5.3 mg of each protein were initially diluted to the same starting concentration and centrifuged at 4000×g in 15-minute intervals. At the end of each 15-minute centrifugation step, the concentrators are removed from the centrifuge and a visual estimate of the remaining sample volume is recorded. Concentration is measured by SoloVPE instrument. Concentrated samples were incubated at 4 C and 40 C for 2 weeks and aliquots were drawn at timed intervals to check for the integrity by analytical SEC. TMCB150 and the parental mAbs (CD3B376 and TMEB762) concentrated normally. Final concentration of TMCB150 was 99.4 mg/mL and that of the parental mAbs were 52.2 mg/mL (TMEB762) and 52.6 mg/mL (CD3B376). Concentration remained the same for 2 weeks at 4 C and 40 C suggesting that molecules have good intrinsic properties with no potential for aggregation or adsorption to the eppendorf tubes. % species (A: Aggregate; M: Monomer; F: Fragment) as measured from SEC peak integration is provided below in the table. At high concentration, molecules are intact with 4-5% aggregates and <0.3% fragments after storing for 2 weeks at 40 C predicting good shelf life.

TABLE 76

| | Time Zero | | | 2 weeks, 4° C. | | | 2 weeks, 40° C. | | |
|---|---|---|---|---|---|---|---|---|---|
| | A | M | F | A | M | F | A | M | F |
| TMCB150 | 0.8 | 99.2 | 0 | 1.4 | 98.6 | 0 | 3.6 | 96.1 | 0.3 |
| TMEB762 | 2.5 | 97.5 | 0 | 2.7 | 97.3 | 0 | 3.1 | 96.9 | 0 |
| CD3B376 | 1.1 | 98.9 | 0 | 2.5 | 97.5 | 0 | 5.1 | 94.7 | 0.2 |

### Affinity Determination of Anti-TMEFF2/CD3 Bispecific Antibody by Kinetic Exclusion Assay (KinExA)

[0892] A KinExA 3200 instrument (Sapidyne Instruments, Inc.) was used to measure solution equilibrium affinity, K_{D}, of the bispecifc mAb TMCB150 and its bivalent TMEFF2 parent TMEB762 mAb to human TMEFF2 extracellular domain (ECD). Serial dilutions of human TMEFF2 extracellular domain (ECD) were prepared with a constant concentration of anti-TMEFF2 mAb in 10 mM HEPES, 150 mM NaCL, 0.05% surfactant P20, pH 7.4, 0.1% BSA, and 0.02% NaN3. The reaction mixtures were incubated at RT until the binding interactions reached equilibrium. The duration of the incubation was determined using KinExA software simulation. Beads were prepared by direct covalent immobilization of TMEFF2-ECD by amine-coupling on pre-activated beads composed of bis-acrylamide/azlactone copolymer (Pierce Biotechnology, Inc.). After incubation the samples were run on the KinExA instrument to assess free antibody in the mixture by passing the mixture though the TMEFF2-modified beads, and detecting the captured antibody using a fluorescently labeled secondary antibody. The data was fit with a 1:1 binding model using the KinExA Pro software.

TABLE 77

| mAb sample | K_{D} pM | 95% CI, K_{D} pM |
|---|---|---|
| TMCB150 | 63.6 | 55.8-71.9 |
| TMEB762 | 46.1 | 38.0-55.1 |

Measurement of binding affinity of anti-TMEFF2/CD3 bispecific antibody to N-terminal CD3ε peptide

[0893] Kinetic rate constants were measured by SPR performed using Biacore 8K (GE Healthcare) and anti-human Fc biosensor surfaces. Anti-human immunoglobulin antibodies were covalently coupled to the surface of a CM4 sensor chip (GE Healthcare). Antibodies of interest were captured on the anti-human immunoglobulin sensor chip, followed by injection of N-terminal CD3ε peptide at various concentrations in HEPES Buffered Saline containing 0.05% surfactant P20 (Tween™ 20) and 100 ug/mL BSA. The surface was regenerated with 2 pulses injections of 30 μL of 0.8% phosphoric acid at 100 μL/min. Data reported is the difference in SPR signal between the flow cell containing the captured antibody and a reference cell without captured antibody. Additional instrumental contributions to the signal were removed by subtraction of the data from the blank injection from the reference-subtracted signal. The data were analyzed by fitting association and dissociation phases at all concentrations (global fit) with a 1:1 binding model using the Biaevaluation software (Biacore, Inc.). Data is reported as average+95% CI (Confidence Interval) which is calculated by t value for 95% CI*stdev/square root of the number of replicates.

TABLE 78

| | Average | Average | Average | 95% CI, |
|---|---|---|---|---|
| mAb sample | kₒₙ (1/Ms) | k_{off} (1/s) | K_{D}, nM | K_{D} pM |
| TMCB150 | 3.57E+04 | 1.03E−03 | 28.7 | 24.4-34.3 |
| CD3B376 | 4.33E+04 | 1.17E−03 | 26.9 | 21.1-34.4 |

[0894] 7-8 Bispecific TMEFF2×CD3 Antibodies are Effective in T-Cell Mediated Killing of Prostate Cancer Cells

### T-Cell Mediated Killing of Prostate Cancer Cells

[0895] Select bispecific TMEFF2×CD3 antibodies were assessed for their ability to mediate T-cell mediated killing of prostate cancer cells.

[0896] T-cell mediated killing of the TMEFF2×CD3 bispecific antibodies was measured using a caspase cytotoxicity assay that indirectly measures cell killing via cleavage of a fluorescent substrate by active caspase 3/7. Cleavage of the substrate results in a fluorescent DNA dye, with fluorescence restricted to the cell nucleus. Repeated fluorescence measurements are taken in each well throughout the course of the assay, using a motorized 10× objective, capable of precisely imaging well(s) at the same coordinates. Target cell populations are identified based on defined size restrictions and/or through the use of a secondary label.

[0897] Frozen Pan CD3⁺ T-cells (Biological Specialty Corporation, Colmar, Pa.) were isolated by negative selection from normal healthy donors. Prostate cancer cells expressing TMEFF2 (LNCaP-AR) were cultured in RPMI 1640 with 10% HI FBS+supplements (Life Technologies). T-cells and target cells were combined at an effector to target ratio (E:T) of 3:1 in Phenol Red free RPMI+10% FBS and supplements (Life Technologies), without selection reagents, and 0.6 uL of NucView caspase reagent (Essen Bioscience) was added to each mL of cells, per manufacturer guidelines. A total volume of 0.1 mL cells were added to appropriate wells of a clear, 96-well flat-bottom plate (BD Falcon). TMEFF2×CD3 bispecific antibodies were prepared at 2× final concentration in Phenol Red free RPMI, prepared as indicated above, and 0.1 mL of compounds were added to each well. After 30 minute incubation at room temperature to minimize cell aggregation at the edge of wells, plates were transferred to the Zoom Incucyte instrument (Essen Bioscience) held at 37° C., 5% CO2.

[0898] Processing definitions on the Incucyte were designed for each cell line tested, per manufacture guidelines. Measurements were taken every six hours, until a plateau in the caspase signal was observed, and followed by three or more successive decreases from the maximum signal in the well(s) containing the highest concentration of the test compound(s).

[0899] After the assay was complete, each plate was analyzed using the appropriate processing definition. Raw fluorescent data was exported from the Incucyte Zoom software, and pasted into GraphPad Prism (GraphPad Software, Inc., La Jolla, Calif.). Caspase 3/7 activity was determined by calculating the area under the curve (AUC) for each well in GraphPad. AUC values were plotted as a function of Log 10 nM compound. The EC50 for each dose curve, in nanomolar (nM), was reported following non-linear regression analysis (4 parameter fit, least ordinary squares). Each assay contained a minimum of three biologic replicates, and each cell line was tested using T-cells from five healthy donors. Data were further analyzed by non-clinical statistics using a non-linear regression model.

### Bispecific TMEFF2×CD3 Antibodies are Effective in In Vivo Prostate Cancer Tumor Models

[0900] Select bispecific antibodies were tested in ex vivo LnCaP prostate cancer model in male NSG mice. For the study, 10⁶LnCaP cells in 50% Cultrex in 0.2 mL/animal were administered by subcutaneous injection into right flank on Day 0. The animals were randomized when tumors reached a volume of about ˜100-150 mm³ and injected 20⁶ T-cells intraperitoneally/mouse at day 15. Ten animals were in each group. Treatment with the antibodies began 1-3 days post T-cell injections. Antibodies were administered intraperitoneally twice a week. Prior to dosing, all animals received IVIG+Fc Block. Tumor volume and body weight was assessed twice a week until tumors reached ˜1200 mm³. Treatment groups are shown in Table 79. CD3×Null antibody was used as a negative control in these assays, having a CD3 binding arm and a null arm binding HIV gp120.

TABLE 79

| Group | Treatment | Dose | |
|---|---|---|---|
| 1 | CD3xNull | 5 | mg/kg |
| 6 | TMCB131 (TMEB570 x | 5 | mg/kg |
| 7 | TMCB131 (TMEB570 x | 0.5 | mg/kg |
| 8 | TMCB132 (TMEB675 x | 5 | mg/kg |
| 9 | TMCB132 (TMEB675 x | 0.5 | mg/kg |

Table 80 shows the percent tumor growth inhibition on day 38 per each group post tumor implant.
FIG. 71 shows the reduction in mean tumor volume over time post tumor implant. FIG. 72 shows the reduction in mean tumor volume of each mouse treated with 0.05, 0.1 or 0.5 mg/kg TMEB762×CD3B376.

TABLE 80

| Treatment | % TGI on day 38 |
|---|---|
| CNTO7008 (Null x CD3) | |
| TMCB132 (TMEB675 x CD3B376) 5 mg/kg | 48 |
| TMCB132 (TMEB675 x CD3B376) 0.5 mg/kg | 47.7 |
| TMCB131 (TMEB570 x CD3B376) 5 mg/kg | 23.3 |
| TMCB131 (TMEB570 x CD3B376) 0.5 mg/kg | 35 |

[0901] Efficacy of TMEB762×CD3B376 (TMCB150) was also evaluated in established LNCaP xenografts in male NOD.Cg-Prkdc^{scid} Il2rg^{tm1Wjl}/SzJ (NSG) mice humanized with 20e6 T cells. Animals were randomized into groups of 10 animals each by mean tumor volume on day 13 post tumor implantation. TMEB762×CD3B376 at 0.5, 0.1 and 0.05 mg/kg or null×CD3B376 antibody control at 0.5 mg/kg were dosed IP twice weekly for 5 weeks. On day 35 post-tumor implantation, when at least eight animals remained per group, tumor growth inhibition (% TGI) as determined by tumor volume was calculated. Statistically significant tumor growth inhibition was observed with TMEB762×CD3B376 at 0.5 and 0.1 mg/kg, but not at 0.05 mg/kg, as compared to null×CD3 control (FIG. 72, p≤0.0001). TMEB762×CDB376 at 0.5, 0.1, and 0.05 mg/kg elicited tumor growth inhibition of 110%, 88% and 25%, respectively, as compared to null×CD3 treated controls. TMEB762×CDB376 treatment resulted in seven and three complete responses at 0.5 and 0.1 mg/kg, respectively. Subcutaneous LNCaP tumors were measured by caliper twice weekly and the results presented as mean tumor volume (mm³)±SEM (≥8 mice remaining per group).

[0902] T Cell Activation in Response to Administration of TMCB132

[0903] T cell activation in LnCaP prostate cancer cells was measured by flow cytometry, specifically by assessing CD25 positivity of CD3+/CD8+ T cells in 6 separate normal healthy donors (9642, 9672, 9762, 9772, 9832, 9852) 72 hours after treatment with TMCB132 (FIG. 73). Activation of CD3+ pan-T cells added at a 3:1 effector:target ratio was observed in response to administration of TMCB132 on LnCaP prostate cancer cells.

[0904] T-Cell Mediated Cytotoxicity of TMCB132 In Vitro.

[0905] T-cell-mediated cytotoxicity assay was used to evaluate the cytotoxicity potential of TMCB132 in vitro, using live-time lapse imaging on the Incucyte platform. TMCB132 was tested in TMEFF2 positive cell line LnCaP, in presence of isolated pan human CD3+ T cells from healthy donors at a (Effector:Target) effector:target ratio (E:T ratio) of 3:1. Cell death by apoptosis was monitored by measuring the fluorescence signal for active caspase-3/7 over a time period of 96 hours. TMCB132 promoted a dose-dependent reduction of viable LnCaP cells with increasing time. Dose-dependent increase in caspase-3/7 activity or fluorescence signal indicated cell death in LnCaP cells in presence of the T cells (FIG. 74). The data suggests that TMCB132 is effective in inducing T cell-mediated death in the LnCaP tumor cells.

[0906] Efficacy of TMCB132 in Established SC Human Prostate Xenograph in T-Cell Humanized Mice.

[0907] The antitumor efficacy of TMCB132 was evaluated in established subcutaneous (SC) human prostate LNCaP xenografts in male NOD.Cg-Prkdc^{scid} Il2rg^{tm1Wjl}/SzJ (NSG, The Jackson Laboratory, Bar Harbor, Me.) mice humanized with 20e⁶ T cells. Animals were randomized into groups of 10 animals each by mean tumor volume on day 13 post tumor implantation. TMCB132 at 0.5, 0.1 and 0.05 mg/kg or null×CD3B219 antibody control at 0.5 mg/kg were dosed IP twice weekly for 4 weeks. On day 45 post-tumor implantation, when at least seven animals remained per group, tumor growth inhibition (% TGI) as determined by tumor volume was calculated. Statistically significant tumor growth inhibition was observed with TMCB132 at 0.5 and 0.1 mg/kg and 0.05 mg/kg, as compared to null×CD3 control (FIG. 75, p≤0.0001). TMCB132 at 0.5, 0.1, and 0.05 mg/kg elicited tumor growth inhibition of 102%, 109% and 47%, respectively, as compared to null×CD3 treated controls. TMCB132 treatment resulted in three, two and one complete responses at 0.5, 0.1 and 0.05 mg/kg, respectively

What is claimed:

1. An isolated recombinant anti-CD3 antibody, or antigen-binding fragment thereof, comprising:
a) a heavy chain comprising a heavy chain complementarity determining region (HCDR) 1 comprising SEQ ID NO: 662; a HCDR2 comprising SEQ ID NO: 663; and a HCDR3 comprising SEQ ID NO: 664 and a light chain comprising a light chain complementarity determining region (LCDR) 1 comprising SEQ ID NO:671, a LCDR2 comprising SEQ ID NO: 673, and a LCDR3 comprising SEQ ID NO: 690;
b) a heavy chain variable region comprising SEQ ID NO: 652 and a light chain variable region comprising SEQ ID NO: 661;
c) a heavy chain comprising SEQ ID NO: 640 and a light chain comprising SEQ ID NO: 676;
d) a heavy chain variable region comprising SEQ ID NO: 657 and a light chain variable region comprising SEQ ID NO: 678; or
e) a heavy chain comprising SEQ ID NO: 675 and a light chain comprising SEQ ID NO: 677.

2. An isolated recombinant anti-CD3 antibody or antigen-binding fragment thereof, wherein the antibody or antigen-binding fragment specifically binds Macaca fascicularis or human CD3d, or CD3e, or CD3e and CD3d with a binding affinity of about 300 nM or less.

3. The isolated recombinant anti-CD3 antibody or antigen-binding fragment thereof of claim 2, wherein the binding affinity is about 100 nM or less.

4. The isolated recombinant anti-CD3 antibody or antigen-binding fragment thereof of claim 2, wherein the binding affinity is measured by flow cytometry or by Proteon surface plasmon resonance assay ProteOn XPR36 system at +25° C.

5. The isolated recombinant anti-CD3 antibody or antigen-binding fragment thereof of claim 2, wherein the antibody or antigen-binding fragment has one, two, three, or four of the following properties:
a) binds human and Macaca fascicularis CD3+ T lymphocytes with a calculated EC50 of 300 nM or less and binds Macaca fascicularis CD3-expressing HEK cells with a calculated EC50 of 300 nM or less, wherein the difference in calculated EC50 between binding CD3+ T lymphocytes and binding Macaca fascicularis CD3-expressing HEK cells is less than 5-fold, and wherein the calculated EC50 is measured in a whole cell binding assay at 0° C. using flow cytometry;
b) binds recombinant CD3d from human (SEQ ID NO:691), or binds recombinant CD3e from human (SEQ ID NO:636), or binds recombinant CD3d from Macaca fascicularis (SEQ ID NO:692), or binds recombinant CD3e from Macaca fascicularis (SEQ ID NO:693) with an equilibrium dissociation constant (K_{D}) of 300 nM or less, wherein the K_{D} is measured using Proteon surface plasmon resonance assay ProteOn XPR36 system at +25° C.;
c) binds residues 1-6 of CD3e as determined by X-ray crystallography; or
d) activates T cells or induces CD69 expression to a similar degree as cOKT3 or SP34-2 as determined by fluorescence-activated cell sorting assay.

6. The antibody or antigen-binding fragment thereof of claim 2 comprising at least one substitution in an antibody constant domain, the at least one substitution comprising:
a) heavy chain substitutions K409R, F405L, or F405L and R409K;
b) heavy chain substitutions S228P, F234A, and L235A;
c) heavy chain substitutions L234A, G237A, P238S, H268A, A330S and P331S, wherein the antibody is an IgG1 isotype; or
d) heavy chain substitution S228P, wherein the antibody is an IgG4 isotype;
wherein residue numbering is according to the EU Index.

7. The antibody or antigen-binding fragment thereof of claim 2, comprising the HCDR1, the HCDR2, the HCDR3, the LCDR1, the LCDR2, and the LCDR3 of SEQ ID NOs:662, 663, 664, 671, 673, and 690, respectively.

8. The antibody or antigen-binding fragment thereof of claim 2, comprising a heavy chain variable region (VH) and a light chain variable region (VL) of SEQ ID NOs:652 and 661, respectively.

9. The antibody or antigen-binding fragment thereof of claim 2, comprising a heavy chain sequence (HC) and a light chain sequence (LC) of SEQ ID NOs:640 and 676, respectively.

10. The antibody or antigen-binding fragment thereof of claim 2, comprising a VH and a VL of SEQ ID NOs:657 and 678, respectively.

11. The antibody or antigen-binding fragment thereof of claim 2, comprising a HC and a LC of SEQ ID NOs:675 and 677, respectively.

12. An antibody or antigen-binding fragment thereof, comprising the HCDR1, the HCDR2, the HCDR3, the LCDR1, the LCDR2, and the LCDR3 of SEQ ID NOs: 662, 663, 664, 671, 673, and 690, respectively.

13. An antibody or antigen-binding fragment thereof, comprising a VH and a VL of SEQ ID NOs:652 and 661, respectively.

14. An antibody or antigen-binding fragment thereof, comprising a HC and a LC of SEQ ID NOs:640 and 676, respectively.

15. An antibody or antigen-binding fragment thereof, comprising a VH and a VL of SEQ ID NOs:657 and 678, respectively.

16. An antibody or antigen-binding fragment thereof, comprising a HC and a LC of SEQ ID NOs:675 and 677, respectively.

17. The antibody or antigen-binding fragment thereof of claim 2, wherein the antibody is human or humanized.

18. The antibody of claim 17, wherein the antibody is an IgG4 or IgG1 isotype.

19. The antibody of claim 18, comprising one, two, three, four, five, six, seven, eight, nine or ten substitutions in the antibody Fc.

20. An antibody or antigen-binding fragment thereof, comprising a HC of SEQ ID NO:639 and a LC of SEQ ID NOs:646, comprising at least one substitution comprising:
a) D43G, L49M, L50I, S62N, Q85E light chain substitutions;
b) D43G, V48L, L49M, L50I, S62N, Q85E, H89Y light chain substitutions;
c) R10G, R13K, V73I, R70K, T83S, L96V heavy chain substitutions;
d) any one of light chain substitutions D43G, V48L, L49M, L50I, S62N, Q85E, or H89Y; or
e) any one of heavy chain substitutions R10G, R13K, V73I, R79K, T83S, or L96V, wherein residue numbering is according to the EU Index.

21. The antibody of claim 2, wherein the antibody is bispecific or multispecific.

22. A bispecific antibody comprising a first domain that specifically binds CD3 and a second domain that specifically binds a second antigen, wherein the first domain comprises the HCDR1, the HCDR2, the HCDR3, the LCDR1, the LCDR2, and the LCDR3 of SEQ ID NOs:662, 663, 664, 671, 673, and 690, respectively.

23. The bispecific antibody of claim 22 wherein the first domain and second domain are an IgG4 isotype, and wherein the first or the second domain comprises S228P, F234A, L235A, F405L and R409K heavy chain substitutions and the other domain of the first or the second domain comprises S228P, F234A and L235A heavy chain substitution, wherein residue numbering is according to the EU Index.

24. The bispecific antibody of claim 22, wherein the first and/or the second domain comprises at least one substitution in a CH3 constant domain comprising a F405L, or F405L and R409K substitution, wherein residue numbering is according to the EU Index.

25. The bispecific antibody of claim 22, wherein one of the first or the second domains comprises a F405L heavy chain substitution and the other of the first or second domains comprises a K409R heavy chain substitution, wherein residue numbering is according to the EU Index.

26. The bispecific antibody of claim 22, wherein the first domain and the second domain are an IgG4 isotype, wherein one of the first or the second domains comprises a S228P heavy chain substitution and the other of the first or the second domains comprises S228P, F405L and R409K heavy chain substitutions, wherein residue numbering is according to the EU Index.

27. The bispecific antibody of claim 22, wherein the first domain comprises the VH and the VL of SEQ ID NOs: 652 and 661, respectively.

28. The bispecific antibody of claim 22, wherein the first domain comprises the HC and the LC of SEQ ID NOs: 640 and 676, respectively.

29. The bispecific antibody of claim 22, wherein the first domain comprises the VH and the VL of SEQ ID NOs:657 and 678, respectively.

30. The bispecific antibody of claim 22, wherein the first domain comprises the HC and the LC of SEQ ID NOs:675 and 677, respectively.

31. The bispecific antibody of claim 22, wherein the second antigen is a cell surface antigen that is expressed on a target cell other than an immune effector cell.

32. The bispecific antibody of claim 31, wherein the cell surface antigen is a tumor associated antigen.

33. The bispecific antibody of claim 22, wherein the second antigen is CD33, IL1RAP, PSMA or TMEFF2.

34. A pharmaceutical composition comprising the antibody of claim 2 and a pharmaceutically acceptable carrier.

35. A polynucleotide encoding the antibody of claim 2.

36. A vector comprising the polynucleotide of claim 35.

37. A host cell comprising the vector of claim 36.

38. A method of producing the antibody of claim 2, comprising culturing the host cell of claim 37 in conditions that the antibody is expressed, and recovering the antibody produced by the host cell.

39. A method of treating a cancer in a subject, comprising administering a therapeutically effective amount of the isolated antibody of claim 2 to the subject in need thereof for a time sufficient to treat the cancer.

40. The method of claim 39, wherein the cancer is a solid tumor or a hematological malignancy.

41. The method of claim 40, wherein the solid tumor is a prostate cancer, a colorectal cancer, a gastric cancer, a clear cell renal carcinoma, a bladder cancer, a lung cancer, a squamous cell carcinoma, a glioma, a breast cancer, a kidney cancer, a neovascular disorder, a clear cell renal carcinoma (CCRCC), a pancreatic cancer, a renal cancer, a urothelial cancer or an adenocarcinoma to the liver.

42. The method of claim 41, wherein the prostate cancer is a refractory prostate cancer, a prostatic intraepithelial neoplasia, an androgen independent prostate cancer, or a malignant prostate cancer.

43. The method of claim 40, wherein the hematological malignancy is acute myeloid leukemia (AML), myelodysplastic syndrome (MDS), acute lymphocytic leukemia (ALL), diffuse large B-cell lymphoma (DLBCL), chronic myeloid leukemia (CML) or blastic plasmacytoid dendritic cell neoplasm (DPDCN).

44. The method of claim 39, wherein the antibody is administered in combination with a second therapeutic agent.

45. The antibody of claim 2 for use in therapy.

46. An anti-idiotypic antibody binding to the antibody of claim 2.

The application's sequence listing, which the Patent Office published only in electronic form, follows.

SEQUENCE LISTING (729 sequences)

SEQ ID NO: 1 - protein, 17 aa, Artificial Sequence
  Description of Artificial Sequence: Synthetic peptide
EISGSGGYTNYADSMKG

SEQ ID NO: 2 - protein, 17 aa, Artificial Sequence
  Description of Artificial Sequence: Synthetic peptide
EISGSGGYTNYADSMKS

SEQ ID NO: 3 - protein, 17 aa, Artificial Sequence
  Description of Artificial Sequence: Synthetic peptide
EISGSGGYTNYADSLKG

SEQ ID NO: 4 - protein, 11 aa, Artificial Sequence
  Description of Artificial Sequence: Synthetic peptide
RASQSVSNYLA

SEQ ID NO: 5 - protein, 9 aa, Artificial Sequence
  Description of Artificial Sequence: Synthetic peptide
QQRGNWPLT

SEQ ID NO: 6 - protein, 124 aa, Artificial Sequence
  Description of Artificial Sequence: Synthetic polypeptide
EVQLLESGGGLVQPGGSLRLSCAASGFTFKSDAMHWVRQAPGKGLEWVSEISGSGGYTNYADSMKGRFTISRDNSKNTLYLQMNSLRAEDTAVYYCARDSYDSSLYVGDYFDYWGQGTLVTVSS

SEQ ID NO: 7 - protein, 124 aa, Artificial Sequence
  Description of Artificial Sequence: Synthetic polypeptide
EVQLLESGGGLVQPGGSLRLSCAASGFTFKSDAMHWVRQAPGKGLEWVSEISGSGGYTNYADSMKSRFTISRDNSKNTLYLQMNSLRAEDTAVYYCARDSYDSSLYVGDYFDYWGQGTLVTVSS

SEQ ID NO: 8 - protein, 124 aa, Artificial Sequence
  Description of Artificial Sequence: Synthetic polypeptide
EVQLLESGGGLVQPGGSLRLSCAASGFTFKSDAMHWVRQAPGKGLEWVSEISGSGGYTNYADSLKGRFTISRDNSKNTLYLQMNSLRAEDTAVYYCARDSYDSSLYVGDYFDYWGQGTLVTVSS

SEQ ID NO: 9 - protein, 107 aa, Artificial Sequence
  Description of Artificial Sequence: Synthetic polypeptide
EIVLTQSPATLSLSPGERATLSCRASQSVSNYLAWYQQKPGQAPRLLIHDASNRATGIPARFSGSGSGTDFTLTISSLEPEDFAVYYCQQRRNWPLTFGQGTKVEIK

SEQ ID NO: 10 - protein, 107 aa, Artificial Sequence
  Description of Artificial Sequence: Synthetic polypeptide
EIVLTQSPATLSLSPGERATLSCRASQSVSSYLAWYQQKPGQAPRLLIYDASNRATGIPARFSGSGSGTDFTLTISSLEPEDFAVYYCQQRGNWPLTFGQGTKVEIK

SEQ ID NO: 11 - protein, 451 aa, Artificial Sequence
  Description of Artificial Sequence: Synthetic polypeptide
EVQLLESGGGLVQPGGSLRLSCAASGFTFKSDAMHWVRQAPGKGLEWVSEISGSGGYTNYADSMKGRFTISRDNSKNTLYLQMNSLRAEDTAVYYCARDSYDSSLYVGDYFDYWGQGTLVTVSSASTKGPSVFPLAPCSRSTSESTAALGCLVKDYFPEPVTVSWNSGALTSGVHTFPAVLQSSGLYSLSSVVTVPSSSLGTKTYTCNVDHKPSNTKVDKRVESKYGPPCPPCPAPEAAGGPSVFLFPPKPKDTLMISRTPEVTCVVVDVSQEDPEVQFNWYVDGVEVHNAKTKPREEQFNSTYRVVSVLTVLHQDWLNGKEYKCKVSNKGLPSSIEKTISKAKGQPREPQVYTLPPSQEEMTKNQVSLTCLVKGFYPSDIAVEWESNGQPENNYKTTPPVLDSDGSFFLYSRLTVDKSRWQEGNVFSCSVMHEALHNHYTQKSLSLSLGK

SEQ ID NO: 12 - protein, 451 aa, Artificial Sequence
  Description of Artificial Sequence: Synthetic polypeptide
EVQLLESGGGLVQPGGSLRLSCAASGFTFKSDAMHWVRQAPGKGLEWVSEISGSGGYTNYADSMKSRFTISRDNSKNTLYLQMNSLRAEDTAVYYCARDSYDSSLYVGDYFDYWGQGTLVTVSSASTKGPSVFPLAPCSRSTSESTAALGCLVKDYFPEPVTVSWNSGALTSGVHTFPAVLQSSGLYSLSSVVTVPSSSLGTKTYTCNVDHKPSNTKVDKRVESKYGPPCPPCPAPEAAGGPSVFLFPPKPKDTLMISRTPEVTCVVVDVSQEDPEVQFNWYVDGVEVHNAKTKPREEQFNSTYRVVSVLTVLHQDWLNGKEYKCKVSNKGLPSSIEKTISKAKGQPREPQVYTLPPSQEEMTKNQVSLTCLVKGFYPSDIAVEWESNGQPENNYKTTPPVLDSDGSFFLYSRLTVDKSRWQEGNVFSCSVMHEALHNHYTQKSLSLSLGK

SEQ ID NO: 13 - protein, 451 aa, Artificial Sequence
  Description of Artificial Sequence: Synthetic polypeptide
EVQLLESGGGLVQPGGSLRLSCAASGFTFKSDAMHWVRQAPGKGLEWVSEISGSGGYTNYADSLKGRFTISRDNSKNTLYLQMNSLRAEDTAVYYCARDSYDSSLYVGDYFDYWGQGTLVTVSSASTKGPSVFPLAPCSRSTSESTAALGCLVKDYFPEPVTVSWNSGALTSGVHTFPAVLQSSGLYSLSSVVTVPSSSLGTKTYTCNVDHKPSNTKVDKRVESKYGPPCPPCPAPEAAGGPSVFLFPPKPKDTLMISRTPEVTCVVVDVSQEDPEVQFNWYVDGVEVHNAKTKPREEQFNSTYRVVSVLTVLHQDWLNGKEYKCKVSNKGLPSSIEKTISKAKGQPREPQVYTLPPSQEEMTKNQVSLTCLVKGFYPSDIAVEWESNGQPENNYKTTPPVLDSDGSFFLYSRLTVDKSRWQEGNVFSCSVMHEALHNHYTQKSLSLSLGK

SEQ ID NO: 14 - protein, 214 aa, Artificial Sequence
  Description of Artificial Sequence: Synthetic polypeptide
EIVLTQSPATLSLSPGERATLSCRASQSVSNYLAWYQQKPGQAPRLLIHDASNRATGIPARFSGSGSGTDFTLTISSLEPEDFAVYYCQQRRNWPLTFGQGTKVEIKRTVAAPSVFIFPPSDEQLKSGTASVVCLLNNFYPREAKVQWKVDNALQSGNSQESVTEQDSKDSTYSLSSTLTLSKADYEKHKVYACEVTHQGLSSPVTKSFNRGEC

SEQ ID NO: 15 - protein, 214 aa, Artificial Sequence
  Description of Artificial Sequence: Synthetic polypeptide
EIVLTQSPATLSLSPGERATLSCRASQSVSSYLAWYQQKPGQAPRLLIYDASNRATGIPARFSGSGSGTDFTLTISSLEPEDFAVYYCQQRGNWPLTFGQGTKVEIKRTVAAPSVFIFPPSDEQLKSGTASVVCLLNNFYPREAKVQWKVDNALQSGNSQESVTEQDSKDSTYSLSSTLTLSKADYEKHKVYACEVTHQGLSSPVTKSFNRGEC

SEQ ID NO: 16 - protein, 15 aa, Artificial Sequence
  Description of Artificial Sequence: Synthetic peptide
DGYSSGRSTTYAFDY

SEQ ID NO: 17 - protein, 9 aa, Artificial Sequence
  Description of Artificial Sequence: Synthetic peptide
MPLNSPHDC

SEQ ID NO: 18 - protein, 11 aa, Artificial Sequence
  Description of Artificial Sequence: Synthetic peptide
RASQGIRNDLG

SEQ ID NO: 19 - protein, 12 aa, Artificial Sequence
  Description of Artificial Sequence: Synthetic peptide
RASQSVSTYYLA

SEQ ID NO: 20 - protein, 120 aa, Artificial Sequence
  Description of Artificial Sequence: Synthetic polypeptide
QVQLQQSGPRLVRPSQTLSLTCAISGDSVFNNNAAWSWIRQSPSRGLEWLGRTYYRSKWLYDYAVSVKSRITVNPDTSRNQFTLQLNSVTPEDTALYYCARGYSSSFDYWGQGTLVTVSS

SEQ ID NO: 21 - protein, 7 aa, Artificial Sequence
  Description of Artificial Sequence: Synthetic peptide
GASYRAT

SEQ ID NO: 22 - protein, 9 aa, Artificial Sequence
  Description of Artificial Sequence: Synthetic peptide
LQDYNYALT

SEQ ID NO: 23 - protein, 9 aa, Artificial Sequence
  Description of Artificial Sequence: Synthetic peptide
QQYGHSPIT

SEQ ID NO: 24 - protein, 9 aa, Artificial Sequence
  Description of Artificial Sequence: Synthetic peptide
LQDYNYSLT

SEQ ID NO: 25 - protein, 118 aa, Artificial Sequence
  Description of Artificial Sequence: Synthetic polypeptide
EVQLLESGGGLVQRGGSLRPSCAASGFTFSSYSMSWVRQAPGKGLEWVSVISGSGGFTDYADSVKGRFTISRDNSKNTLYLHMNSLRAEDTAVYYCARMPLNSPHDYWGQGTLVTVSS

SEQ ID NO: 26 - protein, 120 aa, Artificial Sequence
  Description of Artificial Sequence: Synthetic polypeptide
QLQLQESGPGLVKPSETLSLTCTVSGGSISSSSYYWGWIRQPPGKGLDWIGSINYSGSTYYNPSLKSRVTISVDTSKIQFSLKLRSVTAADTAVYYCARLDGYESPFDYWGQGTLVTVSS

SEQ ID NO: 27 - protein, 119 aa, Artificial Sequence
  Description of Artificial Sequence: Synthetic polypeptide
EVQLLESGGGLVQPPGGSLRLSCAASGFTFSSYSMSWVRQAPGKGLEWVSVISGGGSFTSYADSVKGRFTISRDNSNNTLYLQMSSLRAEDTAFYYCARMPLNSPHDCWGQGTLVTVSS

SEQ ID NO: 28 - protein, 107 aa, Artificial Sequence
  Description of Artificial Sequence: Synthetic polypeptide
AIQMTQSPSSLSASVGDRVTITCRASQGIRNDLGWYQQKPGKAPKLLIYAASSLQSGVPSRFSGSGSGTDFTLTISSLQPEDFATYYCLQDYNYALTFGGGTKVEIK

SEQ ID NO: 29 - protein, 108 aa, Artificial Sequence
  Description of Artificial Sequence: Synthetic polypeptide
EIVLTQSPGTLSLSPGERATLSCRASQSVSTYYLAWYQQKPGQAPRLLIYGASYRATGIPDRFSGSGSGTDFTLTISRLEPEDFAVYYCQQYGHSPITFGQGTKVEIK

SEQ ID NO: 30 - protein, 107 aa, Artificial Sequence
  Description of Artificial Sequence: Synthetic polypeptide
AIQMTQSPSSLSASVGDRVTITCRASQGIRNDLGWYQQKPGKAPKLLIYAASSLQSGVPSRFSGSGSGTDFTLTISSLQPEDFATYYCLQDYNYSLTFGGGTKVEIR

SEQ ID NO: 31 - protein, 108 aa, Artificial Sequence
  Description of Artificial Sequence: Synthetic polypeptide
EIVLTQSPGTLSLSPGERATLSCRASQSVATYYLAWYQQKPGQAPRLLIYGASSRATGIPDRFSGSGSGTDFTLTISRLEPEDFAVYYCQQYGYNPITFGQGTKVEIK

SEQ ID NO: 32 - protein, 445 aa, Artificial Sequence
  Description of Artificial Sequence: Synthetic polypeptide
EVQLLESGGGLVQRGGSLRPSCAASGFTFSSYSMSWVRQAPGKGLEWVSVISGSGGFTDYADSVKGRFTISRDNSKNTLYLHMNSLRAEDTAVYYCARMPLNSPHDYWGQGTLVTVSSASTKGPSVFPLAPCSRSTSESTAALGCLVKDYFPEPVTVSWNSGALTSGVHTFPAVLQSSGLYSLSSVVTVPSSSLGTKTYTCNVDHKPSNTKVDKRVESKYGPPCPPCPAPEAAGGPSVFLFPPKPKDTLMISRTPEVTCVVVDVSQEDPEVQFNWYVDGVEVHNAKTKPREEQFNSTYRVVSVLTVLHQDWLNGKEYKCKVSNKGLPSSIEKTISKAKGQPREPQVYTLPPSQEEMTKNQVSLTCLVKGFYPSDIAVEWESNGQPENNYKTTPPVLDSDGSFFLYSRLTVDKSRWQEGNVFSCSVMHEALHNHYTQKSLSLSLGK

SEQ ID NO: 33 - protein, 451 aa, Artificial Sequence
  Description of Artificial Sequence: Synthetic polypeptide
QVQLVQSGAEVKKPGSSVKVSCKASGGTFSSYYISWVRQAPGQGLEWMGGIIPISGRANYAQKFQGRVTITADESTSTAYMELSSLRSEDTAVYYCARDGYSSGRSTTYAFDYWGQGTLVTVSSASTKGPSVFPLAPCSRSTSESTAALGCLVKDYFPEPVTVSWNSGALTSGVHTFPAVLQSSGLYSLSSVVTVPSSSLGTKTYTCNVDHKPSNTKVDKRVESKYGPPCPPCPAPEAAGGPSVFLFPPKPKDTLMISRTPEVTCVVVDVSQEDPEVQFNWYVDGVEVHNAKTKPREEQFNSTYRVVSVLTVLHQDWLNGKEYKCKVSNKGLPSSIEKTISKAKGQPREPQVYTLPPSQEEMTKNQVSLTCLVKGFYPSDIAVEWESNGQPENNYKTTPPVLDSDGSFFLYSRLTVDKSRWQEGNVFSCSVMHEALHNHYTQKSLSLSLGK

SEQ ID NO: 34 - protein, 446 aa, Artificial Sequence
  Description of Artificial Sequence: Synthetic polypeptide
EVQLLESGGGLVQPPGGSLRLSCAASGFTFSSYSMSWVRQAPGKGLEWVSVISGGGSFTSYADSVKGRFTISRDNSNNTLYLQMSSLRAEDTAFYYCARMPLNSPHDCWGQGTLVTVSSASTKGPSVFPLAPCSRSTSESTAALGCLVKDYFPEPVTVSWNSGALTSGVHTFPAVLQSSGLYSLSSVVTVPSSSLGTKTYTCNVDHKPSNTKVDKRVESKYGPPCPPCPAPEAAGGPSVFLFPPKPKDTLMISRTPEVTCVVVDVSQEDPEVQFNWYVDGVEVHNAKTKPREEQFNSTYRVVSVLTVLHQDWLNGKEYKCKVSNKGLPSSIEKTISKAKGQPREPQVYTLPPSQEEMTKNQVSLTCLVKGFYPSDIAVEWESNGQPENNYKTTPPVLDSDGSFFLYSRLTVDKSRWQEGNVFSCSVMHEALHNHYTQKSLSLSLGK

SEQ ID NO: 35 - protein, 214 aa, Artificial Sequence
  Description of Artificial Sequence: Synthetic polypeptide
AIQMTQSPSSLSASVGDRVTITCRASQGIRNDLGWYQQKPGKAPKLLIYAASSLQSGVPSRFSGSGSGTDFTLTISSLQPEDFATYYCLQDYNYALTFGGGTKVEIKRTVAAPSVFIFPPSDEQLKSGTASVVCLLNNFYPREAKVQWKVDNALQSGNSQESVTEQDSKDSTYSLSSTLTLSKADYEKHKVYACEVTHQGLSSPVTKSFNRGEC

SEQ ID NO: 36 - protein, 215 aa, Artificial Sequence
  Description of Artificial Sequence: Synthetic polypeptide
EIVLTQSPGTLSLSPGERATLSCRASQSVSTYYLAWYQQKPGQAPRLLIYGASYRATGIPDRFSGSGSGTDFTLTISRLEPEDFAVYYCQQYGHSPITFGQGTKVEIKRTVAAPSVFIFPPSDEQLKSGTASVVCLLNNFYPREAKVQWKVDNALQSGNSQESVTEQDSKDSTYSLSSTLTLSKADYEKHKVYACEVTHQGLSSPVTKSFNRGEC

SEQ ID NO: 37 - protein, 214 aa, Artificial Sequence
  Description of Artificial Sequence: Synthetic polypeptide
AIQMTQSPSSLSASVGDRVTITCRASQGIRNDLGWYQQKPGKAPKLLIYAASSLQSGVPSRFSGSGSGTDFTLTISSLQPEDFATYYCLQDYNYSLTFGGGTKVEIRRTVAAPSVFIFPPSDEQLKSGTASVVCLLNNFYPREAKVQWKVDNALQSGNSQESVTEQDSKDSTYSLSSTLTLSKADYEKHKVYACEVTHQGLSSPVTKSFNRGEC

SEQ ID NO: 38 - protein, 215 aa, Artificial Sequence
  Description of Artificial Sequence: Synthetic polypeptide
EIVLTQSPGTLSLSPGERATLSCRASQSVATYYLAWYQQKPGQAPRLLIYGASSRATGIPDRFSGSGSGTDFTLTISRLEPEDFAVYYCQQYGYNPITFGQGTKVEIKRTVAAPSVFIFPPSDEQLKSGTASVVCLLNNFYPREAKVQWKVDNALQSGNSQESVTEQDSKDSTYSLSSTLTLSKADYEKHKVYACEVTHQGLSSPVTKSFNRGEC

SEQ ID NO: 39 - DNA, 354 bp, Artificial Sequence
  Description of Artificial Sequence: Synthetic polynucleotide
gaggtgcagctgctggaaagcggcggaggcctggtgcagagaggaggaagcctgagacccagctgtgccgccagcggcttcaccttcagcagctacagcatgagctgggtcaggcaggcccctggcaaaggactggagtgggtgagcgtgattagcggcagcggcggcttcaccgattacgccgacagcgtgaagggcaggttcaccatcagcagggacaatagcaagaacaccctgtacctgcacatgaacagcctgagggccgaggacaccgccgtgtactactgcgccaggatgcccctgaacagccctcacgactactggggccagggaaccctggtgaccgtgtccagc

SEQ ID NO: 40 - DNA, 372 bp, Artificial Sequence
  Description of Artificial Sequence: Synthetic polynucleotide
caggtgcagctggtgcagagcggcgcggaagtgaaaaaaccgggcagcagcgtgaaagtgagctgcaaagcgagcggcggcaccttcagctcctattacattagctgggtgcgccaggcgccgggccagggcctggaatggatgggtggcattatcccaatcagtgggcgtgctaattatgcgcagaaatttcagggccgcgtgaccattaccgctgatgaaagcaccagcaccgcgtatatggaactgagcagcctgcgcagcgaagataccgcggtgtattattgcgcgcgcgacggctacagtagtggacgtagcacaacatacgcatttgactattggggccagggcaccctggtgaccgtgtcgagt

SEQ ID NO: 41 - DNA, 357 bp, Artificial Sequence
  Description of Artificial Sequence: Synthetic polynucleotide
gaagtgcagctgctggagagcggaggaggactggtgcagcctcctggcggaagcctgagactgagctgcgccgctagcggcttcaccttcagcagctacagcatgagctgggtgagacaggctcctggcaagggcctggagtgggtgagcgtgatcagcggcggaggcagctttaccagctacgccgacagcgtgaagggcaggttcaccatcagcagggacaacagcaacaacaccctgtacctgcagatgagcagcctgagggccgaggacaccgccttctactactgcgccaggatgcccctgaacagcccccatgactgctggggacagggcaccctggtgaccgtgagcagc

SEQ ID NO: 42 - DNA, 321 bp, Artificial Sequence
  Description of Artificial Sequence: Synthetic polynucleotide
gccatccagatgacccagagccctagcagcctgagcgctagcgtgggcgacagggtgaccatcacctgcagggccagccagggcatcagaaacgacctgggctggtaccagcagaagcccggcaaggcccccaagctgctgatctacgccgccagcagcctgcagagcggagtgcctagcaggttcagcggaagcggcagcggcaccgacttcaccctgaccatcagcagcctgcagcccgaggacttcgccacctactactgcctgcaggactacaactacgccctgacattcggcggcggcaccaaggtggagatcaag

SEQ ID NO: 43 - DNA, 324 bp, Artificial Sequence
  Description of Artificial Sequence: Synthetic polynucleotide
gaaattgtgctgacccagagcccgggcaccctgagcctgagcccgggcgaacgcgcgaccctgagctgccgcgcgagccagagcgtttccacatactacctggcgtggtatcagcagaaaccgggccaggcgccgcgcctgctgatttacggtgcctcctatcgcgcgaccggcattccggatcgctttagcggcagcggttccggcaccgattttaccctgaccattagccgcctggaaccggaagattttgcggtgtattattgccagcagtacggtcacagcccgattacttttggccagggcaccaaagtggaaatcaaa

SEQ ID NO: 44 - DNA, 321 bp, Artificial Sequence
  Description of Artificial Sequence: Synthetic polynucleotide
gccatccagatgacccagagccctagcagcctgagcgctagcgtgggcgacagggtgaccatcacctgcagggccagccagggcatcaggaacgacctgggctggtaccagcagaagcccggcaaggcccccaagctgctgatctacgccgccagcagcctgcagagcggagtgcctagcaggttcagcggcagcggaagcggcaccgacttcaccctgaccatctccagcctgcagcccgaggacttcgccacctactactgcctgcaggactacaactacagcctgaccttcggcggcggcaccaaggtggagatcagg

SEQ ID NO: 45 - DNA, 324 bp, Artificial Sequence
  Description of Artificial Sequence: Synthetic polynucleotide
gaaattgtgctgacccagagcccgggcaccctgagcctgagcccgggcgaacgcgcgaccctgagctgccgcgcgagccagagcgttgccacctattatcttgcgtggtatcagcagaaaccgggccaggcgccgcgcctgctgatttacggtgcatcctcccgtgcgaccggcattccggatcgctttagcggcagcggttccggcaccgattttaccctgaccattagccgcctggaaccggaagattttgcggtgtattattgccagcagtacggctataacccaattacctttggccagggcaccaaagtggaaatcaaa

SEQ ID NO: 46 - DNA, 1335 bp, Artificial Sequence
  Description of Artificial Sequence: Synthetic polynucleotide
gaggtgcagctgctggaaagcggcggaggcctggtgcagagaggaggaagcctgagacccagctgtgccgccagcggcttcaccttcagcagctacagcatgagctgggtcaggcaggcccctggcaaaggactggagtgggtgagcgtgattagcggcagcggcggcttcaccgattacgccgacagcgtgaagggcaggttcaccatcagcagggacaatagcaagaacaccctgtacctgcacatgaacagcctgagggccgaggacaccgccgtgtactactgcgccaggatgcccctgaacagccctcacgactactggggccagggaaccctggtgaccgtgtccagcgcttccaccaagggcccatccgtcttccccctggcgccctgctccaggagcacctccgagagcacagccgccctgggctgcctggtcaaggactacttccccgaaccggtgacggtgtcgtggaactcaggcgccctgaccagcggcgtgcacaccttcccggctgtcctacagtcctcaggactctactccctcagcagcgtggtgaccgtgccctccagcagcttgggcacgaaaacctacacctgcaacgtagatcacaagcccagcaacaccaaggtggacaagagagttgagtccaaatatggtcccccatgcccaccatgcccagcacctgaggccgccgggggaccatcagtcttcctgttccccccaaaacccaaggacactctcatgatctcccggacccctgaggtcacgtgcgtggtggtggacgtgagccaggaagaccccgaggtccagttcaactggtacgtggatggcgtggaggtgcataatgccaagacaaagccgcgggaggagcagttcaacagcacgtaccgtgtggtcagcgtcctcaccgtcctgcaccaggactggctgaacggcaaggagtacaagtgcaaggtctccaacaaaggcctcccgtcctccatcgagaaaaccatctccaaagccaaagggcagccccgagagccacaggtgtacaccctgcccccatcccaggaggagatgaccaagaaccaggtcagcctgacctgcctggtcaaaggcttctaccccagcgacatcgccgtggagtgggagagcaatgggcagccggagaacaactacaagaccacgcctcccgtgctggactccgacggctccttcttcctctacagcaggctaaccgtggacaagagcaggtggcaggaggggaatgtcttctcatgctccgtgatgcatgaggctctgcacaaccactacacacagaagagcctctccctgtctctgggtaaa

SEQ ID NO: 47 - DNA, 1353 bp, Artificial Sequence
  Description of Artificial Sequence: Synthetic polynucleotide
caggtgcagctggtgcagagcggcgcggaagtgaaaaaaccgggcagcagcgtgaaagtgagctgcaaagcgagcggcggcaccttcagctcctattacattagctgggtgcgccaggcgccgggccagggcctggaatggatgggtggcattatcccaatcagtgggcgtgctaattatgcgcagaaatttcagggccgcgtgaccattaccgctgatgaaagcaccagcaccgcgtatatggaactgagcagcctgcgcagcgaagataccgcggtgtattattgcgcgcgcgacggctacagtagtggacgtagcacaacatacgcatttgactattggggccagggcaccctggtgaccgtgtcgagtgcttccaccaagggcccatccgtcttccccctggcgccctgctccaggagcacctccgagagcacagccgccctgggctgcctggtcaaggactacttccccgaaccggtgacggtgtcgtggaactcaggcgccctgaccagcggcgtgcacaccttcccggctgtcctacagtcctcaggactctactccctcagcagcgtggtgaccgtgccctccagcagcttgggcacgaaaacctacacctgcaacgtagatcacaagcccagcaacaccaaggtggacaagagagttgagtccaaatatggtcccccatgcccaccatgcccagcacctgaggccgccgggggaccatcagtcttcctgttccccccaaaacccaaggacactctcatgatctcccggacccctgaggtcacgtgcgtggtggtggacgtgagccaggaagaccccgaggtccagttcaactggtacgtggatggcgtggaggtgcataatgccaagacaaagccgcgggaggagcagttcaacagcacgtaccgtgtggtcagcgtcctcaccgtcctgcaccaggactggctgaacggcaaggagtacaagtgcaaggtctccaacaaaggcctcccgtcctccatcgagaaaaccatctccaaagccaaagggcagccccgagagccacaggtgtacaccctgcccccatcccaggaggagatgaccaagaaccaggtcagcctgacctgcctggtcaaaggcttctaccccagcgacatcgccgtggagtgggagagcaatgggcagccggagaacaactacaagaccacgcctcccgtgctggactccgacggctccttcttcctctacagcaggctaaccgtggacaagagcaggtggcaggaggggaatgtcttctcatgctccgtgatgcatgaggctctgcacaaccactacacacagaagagcctctccctgtctctgggtaaa

SEQ ID NO: 48 - DNA, 1338 bp, Artificial Sequence
  Description of Artificial Sequence: Synthetic polynucleotide
gaagtgcagctgctggagagcggaggaggactggtgcagcctcctggcggaagcctgagactgagctgcgccgctagcggcttcaccttcagcagctacagcatgagctgggtgagacaggctcctggcaagggcctggagtgggtgagcgtgatcagcggcggaggcagctttaccagctacgccgacagcgtgaagggcaggttcaccatcagcagggacaacagcaacaacaccctgtacctgcagatgagcagcctgagggccgaggacaccgccttctactactgcgccaggatgcccctgaacagcccccatgactgctggggacagggcaccctggtgaccgtgagcagcgcttccaccaagggcccatccgtcttccccctggcgccctgctccaggagcacctccgagagcacagccgccctgggctgcctggtcaaggactacttccccgaaccggtgacggtgtcgtggaactcaggcgccctgaccagcggcgtgcacaccttcccggctgtcctacagtcctcaggactctactccctcagcagcgtggtgaccgtgccctccagcagcttgggcacgaaaacctacacctgcaacgtagatcacaagcccagcaacaccaaggtggacaagagagttgagtccaaatatggtcccccatgcccaccatgcccagcacctgaggccgccgggggaccatcagtcttcctgttccccccaaaacccaaggacactctcatgatctcccggacccctgaggtcacgtgcgtggtggtggacgtgagccaggaagaccccgaggtccagttcaactggtacgtggatggcgtggaggtgcataatgccaagacaaagccgcgggaggagcagttcaacagcacgtaccgtgtggtcagcgtcctcaccgtcctgcaccaggactggctgaacggcaaggagtacaagtgcaaggtctccaacaaaggcctcccgtcctccatcgagaaaaccatctccaaagccaaagggcagccccgagagccacaggtgtacaccctgcccccatcccaggaggagatgaccaagaaccaggtcagcctgacctgcctggtcaaaggcttctaccccagcgacatcgccgtggagtgggagagcaatgggcagccggagaacaactacaagaccacgcctcccgtgctggactccgacggctccttcttcctctacagcaggctaaccgtggacaagagcaggtggcaggaggggaatgtcttctcatgctccgtgatgcatgaggctctgcacaaccactacacacagaagagcctctccctgtctctgggtaaa

SEQ ID NO: 49 - DNA, 642 bp, Artificial Sequence
  Description of Artificial Sequence: Synthetic polynucleotide
gccatccagatgacccagagccctagcagcctgagcgctagcgtgggcgacagggtgaccatcacctgcagggccagccagggcatcagaaacgacctgggctggtaccagcagaagcccggcaaggcccccaagctgctgatctacgccgccagcagcctgcagagcggagtgcctagcaggttcagcggaagcggcagcggcaccgacttcaccctgaccatcagcagcctgcagcccgaggacttcgccacctactactgcctgcaggactacaactacgccctgacattcggcggcggcaccaaggtggagatcaagcgtacggtggctgcaccatctgtcttcatcttcccgccatctgatgagcagttgaaatctggaactgcctctgttgtgtgcctgctgaataacttctatcccagagaggccaaagtacagtggaaggtggataacgccctccaatcgggtaactcccaggagagtgtcacagagcaggacagcaaggacagcacctacagcctcagcagcaccctgacgctgagcaaagcagactacgagaaacacaaagtctacgcctgcgaagtcacccatcagggcctgagctcgcccgtcacaaagagcttcaacaggggagagtgt

SEQ ID NO: 50 - DNA, 645 bp, Artificial Sequence
  Description of Artificial Sequence: Synthetic polynucleotide
gaaattgtgctgacccagagcccgggcaccctgagcctgagcccgggcgaacgcgcgaccctgagctgccgcgcgagccagagcgtttccacatactacctggcgtggtatcagcagaaaccgggccaggcgccgcgcctgctgatttacggtgcctcctatcgcgcgaccggcattccggatcgctttagcggcagcggttccggcaccgattttaccctgaccattagccgcctggaaccggaagattttgcggtgtattattgccagcagtacggtcacagcccgattacttttggccagggcaccaaagtggaaatcaaacgtacggtggctgcaccatctgtcttcatcttcccgccatctgatgagcagttgaaatctggaactgcctctgttgtgtgcctgctgaataacttctatcccagagaggccaaagtacagtggaaggtggataacgccctccaatcgggtaactcccaggagagtgtcacagagcaggacagcaaggacagcacctacagcctcagcagcaccctgacgctgagcaaagcagactacgagaaacacaaagtctacgcctgcgaagtcacccatcagggcctgagctcgcccgtcacaaagagcttcaacaggggagagtgt

SEQ ID NO: 51 - DNA, 642 bp, Artificial Sequence
  Description of Artificial Sequence: Synthetic polynucleotide
gccatccagatgacccagagccctagcagcctgagcgctagcgtgggcgacagggtgaccatcacctgcagggccagccagggcatcaggaacgacctgggctggtaccagcagaagcccggcaaggcccccaagctgctgatctacgccgccagcagcctgcagagcggagtgcctagcaggttcagcggcagcggaagcggcaccgacttcaccctgaccatctccagcctgcagcccgaggacttcgccacctactactgcctgcaggactacaactacagcctgaccttcggcggcggcaccaaggtggagatcaggcgtacggtggctgcaccatctgtcttcatcttcccgccatctgatgagcagttgaaatctggaactgcctctgttgtgtgcctgctgaataacttctatcccagagaggccaaagtacagtggaaggtggataacgccctccaatcgggtaactcccaggagagtgtcacagagcaggacagcaaggacagcacctacagcctcagcagcaccctgacgctgagcaaagcagactacgagaaacacaaagtctacgcctgcgaagtcacccatcagggcctgagctcgcccgtcacaaagagcttcaacaggggagagtgt

SEQ ID NO: 52 - protein, 110 aa, Artificial Sequence
  Description of Artificial Sequence: Synthetic polypeptide
QSALTQPASVSGSPGQSITISCTGTSSNIGTYKFVSWYQQHPDKAPKVLLYEVSKRPSGVSSRFSGSKSGNTASLTISGLQAEDQADYHCVSYAGSGTLLFGGGTKLTVL

SEQ ID NO: 53 - protein, 109 aa, Artificial Sequence
  Description of Artificial Sequence: Synthetic polypeptide
EVQLLESGGGLVQPGGSLRLSCAASGFTFSSYAMSWVRQAPGKGLEWVSAISGSGGSTYYADSVKGRFTISRDNSKNTLYLQMNSLRAEDTAVYYCAKWGQGTLVTVSS

SEQ ID NO: 54 - protein, 98 aa, Artificial Sequence
  Description of Artificial Sequence: Synthetic polypeptide
QVQLVQSGAEVKKPGSSVKVSCKASGGTFSSYAISWVRQAPGQGLEWMGGIIPIFGTANYAQKFQGRVTITADESTSTAYMELSSLRSEDTAVYYCAR

SEQ ID NO: 55 - protein, 95 aa, Artificial Sequence
  Description of Artificial Sequence: Synthetic polypeptide
AIQMTQSPSSLSASVGDRVTITCRASQGIRNDLGWYQQKPGKAPKLLIYAASSLQSGVPSRFSGSGSGTDFTLTISSLQPEDFATYYCLQDYNYP

SEQ ID NO: 56 - protein, 5 aa, Artificial Sequence
  Description of Artificial Sequence: Synthetic peptide
SYWIS

SEQ ID NO: 57 - protein, 17 aa, Artificial Sequence
  Description of Artificial Sequence: Synthetic peptide
IIYPGDSYTRYSPSFQG

SEQ ID NO: 58 - protein, 13 aa, Artificial Sequence
  Description of Artificial Sequence: Synthetic peptide
DYEWELFDSRLDY

SEQ ID NO: 59 - protein, 11 aa, Artificial Sequence
  Description of Artificial Sequence: Synthetic peptide
RASQSISSYLN

SEQ ID NO: 60 - protein, 7 aa, Artificial Sequence
  Description of Artificial Sequence: Synthetic peptide
AASSLQS

SEQ ID NO: 61 - protein, 7 aa, Artificial Sequence
  Description of Artificial Sequence: Synthetic peptide
QQSYSTP

SEQ ID NO: 62 - protein, 5 aa, Artificial Sequence
  Description of Artificial Sequence: Synthetic peptide
NAWIS

SEQ ID NO: 63 - protein, 17 aa, Artificial Sequence
  Description of Artificial Sequence: Synthetic peptide
WINPESGRANYAQKFQG

SEQ ID NO: 64 - protein, 16 aa, Artificial Sequence
  Description of Artificial Sequence: Synthetic peptide
ELYYLVYSTYYYAFDY

SEQ ID NO: 65 - protein, 11 aa, Artificial Sequence
  Description of Artificial Sequence: Synthetic peptide
RASQSIDRWLN

SEQ ID NO: 66 - protein, 9 aa, Artificial Sequence
  Description of Artificial Sequence: Synthetic peptide
QQSPRYPLT

SEQ ID NO: 67 - protein, 5 aa, Artificial Sequence
  Description of Artificial Sequence: Synthetic peptide
SYDIS

SEQ ID NO: 68 - protein, 17 aa, Artificial Sequence
  Description of Artificial Sequence: Synthetic peptide
GIIPIEGTANYAQKFQG

SEQ ID NO: 69 - protein, 10 aa, Artificial Sequence
  Description of Artificial Sequence: Synthetic peptide
DYPAGYGFDY

SEQ ID NO: 70 - protein, 12 aa, Artificial Sequence
  Description of Artificial Sequence: Synthetic peptide
RASQSVSSSYLA

SEQ ID NO: 71 - protein, 7 aa, Artificial Sequence
  Description of Artificial Sequence: Synthetic peptide
GASSRAT

SEQ ID NO: 72 - protein, 9 aa, Artificial Sequence
  Description of Artificial Sequence: Synthetic peptide
QQYGSSPLT

SEQ ID NO: 73 - protein, 5 aa, Artificial Sequence
  Description of Artificial Sequence: Synthetic peptide
SDWMS

SEQ ID NO: 74 - protein, 17 aa, Artificial Sequence
  Description of Artificial Sequence: Synthetic peptide
AISGNGGSTEYADSVKG

SEQ ID NO: 75 - protein, 16 aa, Artificial Sequence
  Description of Artificial Sequence: Synthetic peptide
DPYYYYDGDSYYGMDV

SEQ ID NO: 76 - protein, 11 aa, Artificial Sequence
  Description of Artificial Sequence: Synthetic peptide
RASQSISSYLN

SEQ ID NO: 77 - protein, 374 aa, Homo sapiens
MVLWESPRQCSSWTLCEGFCWLLLLPVMLLIVARPVKLAAFPTSLSDCQTPTGWNCSGYDDRENDLFLCDTNTCKFDGECLRIGDTVTCVCQFKCNNDYVPVCGSNGESYQNECYLRQAACKQQSEILVVSEGSCATDAGSGSGDGVHEGSGETSQKETSTCDICQFGAECDEDAEDVWCVCNIDCSQTNFNPLCASDGKSYDNACQIKEASCQKQEKIEVMSLGRCQDNTTTTTKSEDGHYARTDYAENANKLEESAREHHIPCPEHYNGFCMHGKCEHSINMQEPSCRCDAGYTGQHCEKKDYSVLYVVPGPVRFQYVLIAAVIGTIQIAVICVVVLCITRKCPRSNRIHRQKQNTGHYSSDNTTRASTRLI

SEQ ID NO: 78 - protein, 5 aa, Artificial Sequence
  Description of Artificial Sequence: Synthetic peptide
SDAMH

SEQ ID NO: 79 - protein, 17 aa, Artificial Sequence
  Description of Artificial Sequence: Synthetic peptide
EISGSGGYTNYADSVKG

SEQ ID NO: 80 - protein, 15 aa, Artificial Sequence
  Description of Artificial Sequence: Synthetic peptide
DSYDSSLYVGDYFDY

SEQ ID NO: 81 - protein, 11 aa, Artificial Sequence
  Description of Artificial Sequence: Synthetic peptide
RASQSVSSYLA

SEQ ID NO: 82 - protein, 7 aa, Artificial Sequence
  Description of Artificial Sequence: Synthetic peptide
DASNRAT

SEQ ID NO: 83 - protein, 9 aa, Artificial Sequence
  Description of Artificial Sequence: Synthetic peptide
QQRSNWPLT

SEQ ID NO: 84 - protein, 5 aa, Artificial Sequence
  Description of Artificial Sequence: Synthetic peptide
SYAIS

SEQ ID NO: 85 - protein, 17 aa, Artificial Sequence
  Description of Artificial Sequence: Synthetic peptide
WISPYNGNANYAQKFQG

SEQ ID NO: 86 - protein, 10 aa, Artificial Sequence
  Description of Artificial Sequence: Synthetic peptide
DSDRSYNLDY

SEQ ID NO: 87 - protein, 11 aa, Artificial Sequence
  Description of Artificial Sequence: Synthetic peptide
RASQSISGWLN

SEQ ID NO: 88 - protein, 9 aa, Artificial Sequence
  Description of Artificial Sequence: Synthetic peptide
QQSYSTPLT

SEQ ID NO: 89 - protein, 5 aa, Artificial Sequence
  Description of Artificial Sequence: Synthetic peptide
SYWIG

SEQ ID NO: 90 - protein, 17 aa, Artificial Sequence
  Description of Artificial Sequence: Synthetic peptide
IIYPGDSDTRYSPSFQG

SEQ ID NO: 91 - protein, 9 aa, Artificial Sequence
  Description of Artificial Sequence: Synthetic peptide
GLPIWYLDY

SEQ ID NO: 92 - protein, 11 aa, Artificial Sequence
  Description of Artificial Sequence: Synthetic peptide
RASQSVASDLA

SEQ ID NO: 93 - protein, 7 aa, Artificial Sequence
  Description of Artificial Sequence: Synthetic peptide
FASNRAT

SEQ ID NO: 94 - protein, 9 aa, Artificial Sequence
  Description of Artificial Sequence: Synthetic peptide
QQSITWPFT

SEQ ID NO: 95 - protein, 5 aa, Artificial Sequence
  Description of Artificial Sequence: Synthetic peptide
SYAIS

SEQ ID NO: 96 - protein, 17 aa, Artificial Sequence
  Description of Artificial Sequence: Synthetic peptide
WIIPYNGNANYAQKFQG

SEQ ID NO: 97 - protein, 13 aa, Artificial Sequence
  Description of Artificial Sequence: Synthetic peptide
VNSAALVWERLDY

SEQ ID NO: 98 - protein, 17 aa, Artificial Sequence
  Description of Artificial Sequence: Synthetic peptide
GIIPIFGTANYAQKFQG

SEQ ID NO: 99 - protein, 14 aa, Artificial Sequence
  Description of Artificial Sequence: Synthetic peptide
ASRVWHASYGYLDY

SEQ ID NO: 100 - protein, 11 aa, Artificial Sequence
  Description of Artificial Sequence: Synthetic peptide
RASQSVSKWLA

SEQ ID NO: 101 - protein, 9 aa, Artificial Sequence
  Description of Artificial Sequence: Synthetic peptide
QQRFTAPWT

SEQ ID NO: 102 - protein, 10 aa, Artificial Sequence
  Description of Artificial Sequence: Synthetic peptide
GWAYDRGLDY

SEQ ID NO: 103 - protein, 17 aa, Artificial Sequence
  Description of Artificial Sequence: Synthetic peptide
KSSQSVLYSSNNKNYLA

SEQ ID NO: 104 - protein, 7 aa, Artificial Sequence
  Description of Artificial Sequence: Synthetic peptide
WASTRES

SEQ ID NO: 105 - protein, 9 aa, Artificial Sequence
  Description of Artificial Sequence: Synthetic peptide
QQYYSTPLT

SEQ ID NO: 106 - protein, 10 aa, Artificial Sequence
  Description of Artificial Sequence: Synthetic peptide
AYHYSKGLDY

SEQ ID NO: 107 - protein, 5 aa, Artificial Sequence
  Description of Artificial Sequence: Synthetic peptide
DYAIS

SEQ ID NO: 108 - protein, 17 aa, Artificial Sequence
  Description of Artificial Sequence: Synthetic peptide
RIDPIEGTANYAQKFQG

SEQ ID NO: 109 - protein, 17 aa, Artificial Sequence
  Description of Artificial Sequence: Synthetic peptide
DRYYYDGVYWYSDYFDY

SEQ ID NO: 110 - protein, 122 aa, Artificial Sequence
  Description of Artificial Sequence: Synthetic polypeptide
QVQLVQSGAEVKKPGSSVKVSCKASGGTFSSYAISWVRQAPGQGLEWMGWISPYNGNANYAQKFQGRVTITADESTSTAYMELSSLRSEDTAVYYCARVNSAALVWERLDYWGQGTLVTVSS

SEQ ID NO: 111 - protein, 107 aa, Artificial Sequence
  Description of Artificial Sequence: Synthetic polypeptide
DIQMTQSPSSLSASVGDRVTITCRASQSIDRWLNWYQQKPGKAPKLLIYAASSLQSGVPSRFSGSGSGTDFTLTISSLQPEDFATYYCQQSPRYPLTFGQGTKVEIK

SEQ ID NO: 112 - protein, 119 aa, Artificial Sequence
  Description of Artificial Sequence: Synthetic polypeptide
QVQLVQSGAEVKKPGSSVKVSCKASGGTFKSYDISWVRQAPGQGLEWMGGIIPIEGTANYAQKFQGRVTITADESTSTAYMELSSLRSEDTAVYYCARDYPAGYGFDYWGQGTLVTVSS

SEQ ID NO: 113 - protein, 108 aa, Artificial Sequence
  Description of Artificial Sequence: Synthetic polypeptide
EIVLTQSPGTLSLSPGERATLSCRASQSVSSSYLAWYQQKPGQAPRLLIYGASSRATGIPDRFSGSGSGTDFTLTISRLEPEDFAVYYCQQYGSSPLTFGQGTKVEIK

SEQ ID NO: 114 - protein, 125 aa, Artificial Sequence
  Description of Artificial Sequence: Synthetic polypeptide
EVQLLESGGGLVQPGGSLRLSCAASGFTFDSDWMSWVRQAPGKGLEWVSAISGNGGSTEYADSVKGRFTISRDNSKNTLYLQMNSLRAEDTAVYYCARDPYYYYDGDSYYGMDVWGQGTLVTVSS

SEQ ID NO: 115 - protein, 107 aa, Artificial Sequence [sequence omitted]

SEQ ID NO: 116 - protein, 124 aa, Artificial Sequence
  Description of Artificial Sequence: Synthetic polypeptide
EVQLLESGGGLVQPGGSLRLSCAASGFTFKSDAMHWVRQAPGKGLEWVSEISGSGGYTNYADSVKGRFTISRDNSKNTLYLQMNSLRAEDTAVYYCARDSYDSSLYVGDYFDYWGQGTLVTVSS

SEQ ID NO: 117 - protein, 107 aa, Artificial Sequence
  Description of Artificial Sequence: Synthetic polypeptide
EIVLTQSPATLSLSPGERATLSCRASQSVSSYLAWYQQKPGQAPRLLIYDASNRATGIPARFSGSGSGTDFTLTISSLEPEDFAVYYCQQRSNWPLTFGQGTKVEIK

SEQ ID NO: 118 - protein, 125 aa, Artificial Sequence
  Description of Artificial Sequence: Synthetic polypeptide
QVQLVQSGAEVKKPGSSVKVSCKASGGTFDDYAISWVRQAPGQGLEWMGRIDPIEGTANYAQKFQGRVTITADESTSTAYMELSSLRSEDTAVYYCARDRYYYDGVYWYSDYFDYWGQGTLVTVS

SEQ ID NO: 119 - protein, 107 aa, Artificial Sequence [sequence omitted]

SEQ ID NO: 120 - protein, 122 aa, Artificial Sequence
  Description of Artificial Sequence: Synthetic polypeptide
EVQLVQSGAEVKKPGESLKISCKGSGYSFTSYWISWVRQMPGKGLEWMGIIYPGDSYTRYSPSFQGQVTISADKSISTAYLQWSSLKASDTAMYYCARDYEWELFDSRLDYWGQGTLVTVSS

SEQ ID NO: 121 - protein, 119 aa, Artificial Sequence
  Description of Artificial Sequence: Synthetic polypeptide
QVQLVQSGAEVKKPGSSVKVSCKASGGTFSSYAISWVRQAPGQGLEWMGWISPYNGNANYAQKFQGRVTITADESTSTAYMELSSLRSEDTAVYYCARDSDRSYNLDYWGQGTLVTVSS

SEQ ID NO: 122 - protein, 107 aa, Artificial Sequence
  Description of Artificial Sequence: Synthetic polypeptide
DIQMTQSPSSLSASVGDRVTITCRASQSISGWLNWYQQKPGKAPKLLIYAASSLQSGVPSRFSGSGSGTDFTLTISSLQPEDFATYYCQQSYSTPLTFGQGTKVEIK

SEQ ID NO: 123 - protein, 119 aa, Artificial Sequence
  Description of Artificial Sequence: Synthetic polypeptide
EVQLVQSGAEVKKPGESLKISCKGSGYSFTSYWIGWVRQMPGKGLEWMGIIYPGDSDTRYSPSFQGQVTISADKSISTAYLQWSSLKASDTAMYYCARGLPIWYLDYWGQGTLVTVSSA

SEQ ID NO: 124 - protein, 107 aa, Artificial Sequence
  Description of Artificial Sequence: Synthetic polypeptide
EIVLTQSPATLSLSPGERATLSCRASQSVASDLAWYQQKPGQAPRLLIYFASNRATGIPARFSGSGSGTDFTLTISSLEPEDFAVYYCQQSITWPFTFGQGTKVEIK

SEQ ID NO: 125 - protein, 122 aa, Artificial Sequence
  Description of Artificial Sequence: Synthetic polypeptide
QVQLVQSGAEVKKPGSSVKVSCKASGGTFSSYAISWVRQAPGQGLEWMGWIIPYNGNANYAQKFQGRVTITADESTSTAYMELSSLRSEDTAVYYCARVNSAALVWERLDYWGQGTLVTVSS

SEQ ID NO: 126 - protein, 123 aa, Artificial Sequence
  Description of Artificial Sequence: Synthetic polypeptide
QVQLVQSGAEVKKPGSSVKVSCKASGGTFSSYAISWVRQAPGQGLEWMGGIIPIFGTANYAQKFQGRVTITADESTSTAYMELSSLRSEDTAVYYCARASRVWHASYGYLDYWGQGTLVTVSS

SEQ ID NO: 127 - protein, 107 aa, Artificial Sequence
  Description of Artificial Sequence: Synthetic polypeptide
EIVLTQSPATLSLSPGERATLSCRASQSVSKWLAWYQQKPGQAPRLLIYDASNRATGIPARFSGSGSGTDFTLTISSLEPEDFAVYYCQQRFTAPWTFGQGTKVEIK

SEQ ID NO: 128 - protein, 119 aa, Artificial Sequence
  Description of Artificial Sequence: Synthetic polypeptide
EVQLVQSGAEVKKPGESLKISCKGSGYSFTSYWIGWVRQMPGKGLEWMGIIYPGDSDTRYSPSFQGQVTISADKSISTAYLQWSSLKASDTAMYYCARGWAYDRGLDYWGQGTLVTVSS

SEQ ID NO: 129 - protein, 113 aa, Artificial Sequence
  Description of Artificial Sequence: Synthetic polypeptide
DIVMTQSPDSLAVSLGERATINCKSSQSVLYSSNNKNYLAWYQQKPGQPPKLLIYWASTRESGVPDRFSGSGSGTDFTLTISSLQAEDVAVYYCQQYYSTPLTFGQGTKVEIK

SEQ ID NO: 130 - protein, 119 aa, Artificial Sequence
  Description of Artificial Sequence: Synthetic polypeptide
EVQLVQSGAEVKKPGESLKISCKGSGYSFTSYWIGWVRQMPGKGLEWMGIIYPGDSDTRYSPSFQGQVTISADKSISTAYLQWSSLKASDTAMYYCARAYHYSKGLDYWGQGTLVTVSS

SEQ ID NO: 131 - protein, 113 aa, Artificial Sequence; identical to SEQ ID NO: 129
  Description of Artificial Sequence: Synthetic polypeptide

SEQ ID NO: 132 - protein, 449 aa, Artificial Sequence
  Description of Artificial Sequence: Synthetic polypeptide
QVQLVQSGAEVKKPGSSVKVSCKASGGTFSSYAISWVRQAPGQGLEWMGWISPYNGNANYAQKFQGRVTITADESTSTAYMELSSLRSEDTAVYYCARVNSAALVWERLDYWGQGTLVTVSSASTKGPSVFPLAPCSRSTSESTAALGCLVKDYFPEPVTVSWNSGALTSGVHTFPAVLQSSGLYSLSSVVTVPSSSLGTKTYTCNVDHKPSNTKVDKRVESKYGPPCPPCPAPEAAGGPSVFLFPPKPKDTLMISRTPEVTCVVVDVSQEDPEVQFNWYVDGVEVHNAKTKPREEQFNSTYRVVSVLTVLHQDWLNGKEYKCKVSNKGLPSSIEKTISKAKGQPREPQVYTLPPSQEEMTKNQVSLTCLVKGFYPSDIAVEWESNGQPENNYKTTPPVLDSDGSFFLYSRLTVDKSRWQEGNVFSCSVMHEALHNHYTQKSLSLSLGK

SEQ ID NO: 133 - protein, 214 aa, Artificial Sequence
  Description of Artificial Sequence: Synthetic polypeptide
DIQMTQSPSSLSASVGDRVTITCRASQSIDRWLNWYQQKPGKAPKLLIYAASSLQSGVPSRFSGSGSGTDFTLTISSLQPEDFATYYCQQSPRYPLTFGQGTKVEIKRTVAAPSVFIFPPSDEQLKSGTASVVCLLNNFYPREAKVQWKVDNALQSGNSQESVTEQDSKDSTYSLSSTLTLSKADYEKHKVYACEVTHQGLSSPVTKSFNRGEC

SEQ ID NO: 134 - protein, 446 aa, Artificial Sequence
  Description of Artificial Sequence: Synthetic polypeptide
QVQLVQSGAEVKKPGSSVKVSCKASGGTFKSYDISWVRQAPGQGLEWMGGIIPIEGTANYAQKFQGRVTITADESTSTAYMELSSLRSEDTAVYYCARDYPAGYGFDYWGQGTLVTVSSASTKGPSVFPLAPCSRSTSESTAALGCLVKDYFPEPVTVSWNSGALTSGVHTFPAVLQSSGLYSLSSVVTVPSSSLGTKTYTCNVDHKPSNTKVDKRVESKYGPPCPPCPAPEAAGGPSVFLFPPKPKDTLMISRTPEVTCVVVDVSQEDPEVQFNWYVDGVEVHNAKTKPREEQFNSTYRVVSVLTVLHQDWLNGKEYKCKVSNKGLPSSIEKTISKAKGQPREPQVYTLPPSQEEMTKNQVSLTCLVKGFYPSDIAVEWESNGQPENNYKTTPPVLDSDGSFFLYSRLTVDKSRWQEGNVFSCSVMHEALHNHYTQKSLSLSLGK

SEQ ID NO: 135 - protein, 215 aa, Artificial Sequence
  Description of Artificial Sequence: Synthetic polypeptide
EIVLTQSPGTLSLSPGERATLSCRASQSVSSSYLAWYQQKPGQAPRLLIYGASSRATGIPDRFSGSGSGTDFTLTISRLEPEDFAVYYCQQYGSSPLTFGQGTKVEIKRTVAAPSVFIFPPSDEQLKSGTASVVCLLNNFYPREAKVQWKVDNALQSGNSQESVTEQDSKDSTYSLSSTLTLSKADYEKHKVYACEVTHQGLSSPVTKSFNRGEC

SEQ ID NO: 136 - protein, 452 aa, Artificial Sequence
  Description of Artificial Sequence: Synthetic polypeptide
EVQLLESGGGLVQPGGSLRLSCAASGFTFDSDWMSWVRQAPGKGLEWVSAISGNGGSTEYADSVKGRFTISRDNSKNTLYLQMNSLRAEDTAVYYCARDPYYYYDGDSYYGMDVWGQGTLVTVSSASTKGPSVFPLAPCSRSTSESTAALGCLVKDYFPEPVTVSWNSGALTSGVHTFPAVLQSSGLYSLSSVVTVPSSSLGTKTYTCNVDHKPSNTKVDKRVESKYGPPCPPCPAPEAAGGPSVFLFPPKPKDTLMISRTPEVTCVVVDVSQEDPEVQFNWYVDGVEVHNAKTKPREEQFNSTYRVVSVLTVLHQDWLNGKEYKCKVSNKGLPSSIEKTISKAKGQPREPQVYTLPPSQEEMTKNQVSLTCLVKGFYPSDIAVEWESNGQPENNYKTTPPVLDSDGSFFLYSRLTVDKSRWQEGNVFSCSVMHEALHNHYTQKSLSLSLGK

SEQ ID NO: 137 - protein, 214 aa, Artificial Sequence
  Description of Artificial Sequence: Synthetic polypeptide
DIQMTQSPSSLSASVGDRVTITCRASQSISSYLNWYQQKPGKAPKLLIYAASSLQSGVPSRFSGSGSGTDFTLTISSLQPEDFATYYCQQSYSTPLTFGQGTKVEIKRTVAAPSVFIFPPSDEQLKSGTASVVCLLNNFYPREAKVQWKVDNALQSGNSQESVTEQDSKDSTYSLSSTLTLSKADYEKHKVYACEVTHQGLSSPVTKSFNRGEC

SEQ ID NO: 138 - protein, 451 aa, Artificial Sequence
  Description of Artificial Sequence: Synthetic polypeptide
EVQLLESGGGLVQPGGSLRLSCAASGFTFKSDAMHWVRQAPGKGLEWVSEISGSGGYTNYADSVKGRFTISRDNSKNTLYLQMNSLRAEDTAVYYCARDSYDSSLYVGDYFDYWGQGTLVTVSSASTKGPSVFPLAPCSRSTSESTAALGCLVKDYFPEPVTVSWNSGALTSGVHTFPAVLQSSGLYSLSSVVTVPSSSLGTKTYTCNVDHKPSNTKVDKRVESKYGPPCPPCPAPEAAGGPSVFLFPPKPKDTLMISRTPEVTCVVVDVSQEDPEVQFNWYVDGVEVHNAKTKPREEQFNSTYRVVSVLTVLHQDWLNGKEYKCKVSNKGLPSSIEKTISKAKGQPREPQVYTLPPSQEEMTKNQVSLTCLVKGFYPSDIAVEWESNGQPENNYKTTPPVLDSDGSFFLYSRLTVDKSRWQEGNVFSCSVMHEALHNHYTQKSLSLSLGK

SEQ ID NO: 139 - protein, 214 aa, Artificial Sequence
  Description of Artificial Sequence: Synthetic polypeptide
EIVLTQSPATLSLSPGERATLSCRASQSVSSYLAWYQQKPGQAPRLLIYDASNRATGIPARFSGSGSGTDFTLTISSLEPEDFAVYYCQQRSNWPLTFGQGTKVEIKRTVAAPSVFIFPPSDEQLKSGTASVVCLLNNFYPREAKVQWKVDNALQSGNSQESVTEQDSKDSTYSLSSTLTLSKADYEKHKVYACEVTHQGLSSPVTKSFNRGEC

SEQ ID NO: 140 - protein, 453 aa, Artificial Sequence
  Description of Artificial Sequence: Synthetic polypeptide
QVQLVQSGAEVKKPGSSVKVSCKASGGTFDDYAISWVRQAPGQGLEWMGRIDPIEGTANYAQKFQGRVTITADESTSTAYMELSSLRSEDTAVYYCARDRYYYDGVYWYSDYFDYWGQGTLVTVSSASTKGPSVFPLAPCSRSTSESTAALGCLVKDYFPEPVTVSWNSGALTSGVHTFPAVLQSSGLYSLSSVVTVPSSSLGTKTYTCNVDHKPSNTKVDKRVESKYGPPCPPCPAPEAAGGPSVFLFPPKPKDTLMISRTPEVTCVVVDVSQEDPEVQFNWYVDGVEVHNAKTKPREEQFNSTYRVVSVLTVLHQDWLNGKEYKCKVSNKGLPSSIEKTISKAKGQPREPQVYTLPPSQEEMTKNQVSLTCLVKGFYPSDIAVEWESNGQPENNYKTTPPVLDSDGSFFLYSRLTVDKSRWQEGNVFSCSVMHEALHNHYTQKSLSLSLGK

SEQ ID NO: 141 - protein, 446 aa, Artificial Sequence
  Description of Artificial Sequence: Synthetic polypeptide
QVQLVQSGAEVKKPGSSVKVSCKASGGTFSSYAISWVRQAPGQGLEWMGWISPYNGNANYAQKFQGRVTITADESTSTAYMELSSLRSEDTAVYYCARDSDRSYNLDYWGQGTLVTVSSASTKGPSVFPLAPCSRSTSESTAALGCLVKDYFPEPVTVSWNSGALTSGVHTFPAVLQSSGLYSLSSVVTVPSSSLGTKTYTCNVDHKPSNTKVDKRVESKYGPPCPPCPAPEAAGGPSVFLFPPKPKDTLMISRTPEVTCVVVDVSQEDPEVQFNWYVDGVEVHNAKTKPREEQFNSTYRVVSVLTVLHQDWLNGKEYKCKVSNKGLPSSIEKTISKAKGQPREPQVYTLPPSQEEMTKNQVSLTCLVKGFYPSDIAVEWESNGQPENNYKTTPPVLDSDGSFFLYSRLTVDKSRWQEGNVFSCSVMHEALHNHYTQKSLSLSLGK

SEQ ID NO: 142 - protein, 214 aa, Artificial Sequence
  Description of Artificial Sequence: Synthetic polypeptide
DIQMTQSPSSLSASVGDRVTITCRASQSISGWLNWYQQKPGKAPKLLIYAASSLQSGVPSRFSGSGSGTDFTLTISSLQPEDFATYYCQQSYSTPLTFGQGTKVEIKRTVAAPSVFIFPPSDEQLKSGTASVVCLLNNFYPREAKVQWKVDNALQSGNSQESVTEQDSKDSTYSLSSTLTLSKADYEKHKVYACEVTHQGLSSPVTKSFNRGEC

SEQ ID NO: 143 - protein, 445 aa, Artificial Sequence
  Description of Artificial Sequence: Synthetic polypeptide
EVQLVQSGAEVKKPGESLKISCKGSGYSFTSYWIGWVRQMPGKGLEWMGIIYPGDSDTRYSPSFQGQVTISADKSISTAYLQWSSLKASDTAMYYCARGLPIWYLDYWGQGTLVTVSSASTKGPSVFPLAPCSRSTSESTAALGCLVKDYFPEPVTVSWNSGALTSGVHTFPAVLQSSGLYSLSSVVTVPSSSLGTKTYTCNVDHKPSNTKVDKRVESKYGPPCPPCPAPEAAGGPSVFLFPPKPKDTLMISRTPEVTCVVVDVSQEDPEVQFNWYVDGVEVHNAKTKPREEQFNSTYRVVSVLTVLHQDWLNGKEYKCKVSNKGLPSSIEKTISKAKGQPREPQVYTLPPSQEEMTKNQVSLTCLVKGFYPSDIAVEWESNGQPENNYKTTPPVLDSDGSFFLYSRLTVDKSRWQEGNVFSCSVMHEALHNHYTQKSLSLSLGK

SEQ ID NO: 144 - protein, 214 aa, Artificial Sequence
  Description of Artificial Sequence: Synthetic polypeptide
EIVLTQSPATLSLSPGERATLSCRASQSVASDLAWYQQKPGQAPRLLIYFASNRATGIPARFSGSGSGTDFTLTISSLEPEDFAVYYCQQSITWPFTFGQGTKVEIKRTVAAPSVFIFPPSDEQLKSGTASVVCLLNNFYPREAKVQWKVDNALQSGNSQESVTEQDSKDSTYSLSSTLTLSKADYEKHKVYACEVTHQGLSSPVTKSFNRGEC

SEQ ID NO: 145 - protein, 449 aa, Artificial Sequence
  Description of Artificial Sequence: Synthetic polypeptide
QVQLVQSGAEVKKPGSSVKVSCKASGGTFSSYAISWVRQAPGQGLEWMGWIIPYNGNANYAQKFQGRVTITADESTSTAYMELSSLRSEDTAVYYCARVNSAALVWERLDYWGQGTLVTVSSASTKGPSVFPLAPCSRSTSESTAALGCLVKDYFPEPVTVSWNSGALTSGVHTFPAVLQSSGLYSLSSVVTVPSSSLGTKTYTCNVDHKPSNTKVDKRVESKYGPPCPPCPAPEAAGGPSVFLFPPKPKDTLMISRTPEVTCVVVDVSQEDPEVQFNWYVDGVEVHNAKTKPREEQFNSTYRVVSVLTVLHQDWLNGKEYKCKVSNKGLPSSIEKTISKAKGQPREPQVYTLPPSQEEMTKNQVSLTCLVKGFYPSDIAVEWESNGQPENNYKTTPPVLDSDGSFFLYSRLTVDKSRWQEGNVFSCSVMHEALHNHYTQKSLSLSLGK

SEQ ID NO: 146 - protein, 450 aa, Artificial Sequence
  Description of Artificial Sequence: Synthetic polypeptide
QVQLVQSGAEVKKPGSSVKVSCKASGGTFSSYAISWVRQAPGQGLEWMGGIIPIFGTANYAQKFQGRVTITADESTSTAYMELSSLRSEDTAVYYCARASRVWHASYGYLDYWGQGTLVTVSSASTKGPSVFPLAPCSRSTSESTAALGCLVKDYFPEPVTVSWNSGALTSGVHTFPAVLQSSGLYSLSSVVTVPSSSLGTKTYTCNVDHKPSNTKVDKRVESKYGPPCPPCPAPEAAGGPSVFLFPPKPKDTLMISRTPEVTCVVVDVSQEDPEVQFNWYVDGVEVHNAKTKPREEQFNSTYRVVSVLTVLHQDWLNGKEYKCKVSNKGLPSSIEKTISKAKGQPREPQVYTLPPSQEEMTKNQVSLTCLVKGFYPSDIAVEWESNGQPENNYKTTPPVLDSDGSFFLYSRLTVDKSRWQEGNVFSCSVMHEALHNHYTQKSLSLSLGK

SEQ ID NO: 147 - protein, 214 aa, Artificial Sequence
  Description of Artificial Sequence: Synthetic polypeptide
EIVLTQSPATLSLSPGERATLSCRASQSVSKWLAWYQQKPGQAPRLLIYDASNRATGIPARFSGSGSGTDFTLTISSLEPEDFAVYYCQQRFTAPWTFGQGTKVEIKRTVAAPSVFIFPPSDEQLKSGTASVVCLLNNFYPREAKVQWKVDNALQSGNSQESVTEQDSKDSTYSLSSTLTLSKADYEKHKVYACEVTHQGLSSPVTKSFNRGEC

SEQ ID NO: 148 - protein, 446 aa, Artificial Sequence
  Description of Artificial Sequence: Synthetic polypeptide
EVQLVQSGAEVKKPGESLKISCKGSGYSFTSYWIGWVRQMPGKGLEWMGIIYPGDSDTRYSPSFQGQVTISADKSISTAYLQWSSLKASDTAMYYCARGWAYDRGLDYWGQGTLVTVSSASTKGPSVFPLAPCSRSTSESTAALGCLVKDYFPEPVTVSWNSGALTSGVHTFPAVLQSSGLYSLSSVVTVPSSSLGTKTYTCNVDHKPSNTKVDKRVESKYGPPCPPCPAPEAAGGPSVFLFPPKPKDTLMISRTPEVTCVVVDVSQEDPEVQFNWYVDGVEVHNAKTKPREEQFNSTYRVVSVLTVLHQDWLNGKEYKCKVSNKGLPSSIEKTISKAKGQPREPQVYTLPPSQEEMTKNQVSLTCLVKGFYPSDIAVEWESNGQPENNYKTTPPVLDSDGSFFLYSRLTVDKSRWQEGNVFSCSVMHEALHNHYTQKSLSLSLGK

SEQ ID NO: 149 - protein, 220 aa, Artificial Sequence
  Description of Artificial Sequence: Synthetic polypeptide
DIVMTQSPDSLAVSLGERATINCKSSQSVLYSSNNKNYLAWYQQKPGQPPKLLIYWASTRESGVPDRFSGSGSGTDFTLTISSLQAEDVAVYYCQQYYSTPLTFGQGTKVEIKRTVAAPSVFIFPPSDEQLKSGTASVVCLLNNFYPREAKVQWKVDNALQSGNSQESVTEQDSKDSTYSLSSTLTLSKADYEKHKVYACEVTHQGLSSPVTKSFNRGEC

SEQ ID NO: 150 - protein, 446 aa, Artificial Sequence
  Description of Artificial Sequence: Synthetic polypeptide
EVQLVQSGAEVKKPGESLKISCKGSGYSFTSYWIGWVRQMPGKGLEWMGIIYPGDSDTRYSPSFQGQVTISADKSISTAYLQWSSLKASDTAMYYCARAYHYSKGLDYWGQGTLVTVSSASTKGPSVFPLAPCSRSTSESTAALGCLVKDYFPEPVTVSWNSGALTSGVHTFPAVLQSSGLYSLSSVVTVPSSSLGTKTYTCNVDHKPSNTKVDKRVESKYGPPCPPCPAPEAAGGPSVFLFPPKPKDTLMISRTPEVTCVVVDVSQEDPEVQFNWYVDGVEVHNAKTKPREEQFNSTYRVVSVLTVLHQDWLNGKEYKCKVSNKGLPSSIEKTISKAKGQPREPQVYTLPPSQEEMTKNQVSLTCLVKGFYPSDIAVEWESNGQPENNYKTTPPVLDSDGSFFLYSRLTVDKSRWQEGNVFSCSVMHEALHNHYTQKSLSLSLGK

SEQ ID NO: 151 - protein, 449 aa, Artificial Sequence
  Description of Artificial Sequence: Synthetic polypeptide
EVQLVQSGAEVKKPGESLKISCKGSGYSFTSYWISWVRQMPGKGLEWMGIIYPGDSYTRYSPSFQGQVTISADKSISTAYLQWSSLKASDTAMYYCARDYEWELFDSRLDYWGQGTLVTVSSASTKGPSVFPLAPCSRSTSESTAALGCLVKDYFPEPVTVSWNSGALTSGVHTFPAVLQSSGLYSLSSVVTVPSSSLGTKTYTCNVDHKPSNTKVDKRVESKYGPPCPPCPAPEAAGGPSVFLFPPKPKDTLMISRTPEVTCVVVDVSQEDPEVQFNWYVDGVEVHNAKTKPREEQFNSTYRVVSVLTVLHQDWLNGKEYKCKVSNKGLPSSIEKTISKAKGQPREPQVYTLPPSQEEMTKNQVSLTCLVKGFYPSDIAVEWESNGQPENNYKTTPPVLDSDGSFFLYSRLTVDKSRWQEGNVFSCSVMHEALHNHYTQKSLSLSLGK

SEQ ID NO: 152 - protein, 8 aa, Artificial Sequence
  Description of Artificial Sequence: Synthetic peptide
GYSFTSYW

SEQ ID NO: 153 - protein, 8 aa, Artificial Sequence
  Description of Artificial Sequence: Synthetic peptide
IYPSDSYT

SEQ ID NO: 154 - protein, 14 aa, Artificial Sequence
  Description of Artificial Sequence: Synthetic peptide
ARRNSAENYADLDY

SEQ ID NO: 155 - protein, 6 aa, Artificial Sequence
  Description of Artificial Sequence: Synthetic peptide
QSISND

SEQ ID NO: 156 - protein, 3 aa, Artificial Sequence
  Description of Artificial Sequence: Synthetic peptide
YAS

SEQ ID NO: 157 - protein, 9 aa, Artificial Sequence
  Description of Artificial Sequence: Synthetic peptide
QQSFTAPLT

SEQ ID NO: 158 - protein, 8 aa, Artificial Sequence
  Description of Artificial Sequence: Synthetic peptide
GFTFSNYA

SEQ ID NO: 159 - protein, 8 aa, Artificial Sequence
  Description of Artificial Sequence: Synthetic peptide
INYGGGSK

SEQ ID NO: 160 - protein, 11 aa, Artificial Sequence
  Description of Artificial Sequence: Synthetic peptide
AKDYGPFALDY

SEQ ID NO: 161 - protein, 6 aa, Artificial Sequence
  Description of Artificial Sequence: Synthetic peptide
QSVDDW

SEQ ID NO: 162 - protein, 3 aa, Artificial Sequence
  Description of Artificial Sequence: Synthetic peptide
TAS

SEQ ID NO: 163 - protein, 9 aa, Artificial Sequence
  Description of Artificial Sequence: Synthetic peptide
QQYHHWPLT

SEQ ID NO: 164 - protein, 10 aa, Artificial Sequence
  Description of Artificial Sequence: Synthetic peptide
GGSISSSTYY

SEQ ID NO: 165 - protein, 7 aa, Artificial Sequence
  Description of Artificial Sequence: Synthetic peptide
IYFTGST

SEQ ID NO: 166 - protein, 14 aa, Artificial Sequence
  Description of Artificial Sequence: Synthetic peptide
AKEDDSSGYYSFDY

SEQ ID NO: 167 - protein, 6 aa, Artificial Sequence
  Description of Artificial Sequence: Synthetic peptide
QGISSY

SEQ ID NO: 168 - protein, 3 aa, Artificial Sequence
  Description of Artificial Sequence: Synthetic peptide
AAS

SEQ ID NO: 169 - protein, 9 aa, Artificial Sequence
  Description of Artificial Sequence: Synthetic peptide
QQVNSYPLT

SEQ ID NO: 170 - protein, 10 aa, Artificial Sequence
  Description of Artificial Sequence: Synthetic peptide
GVSISSSTYY

SEQ ID NO: 171 - protein, 7 aa, Artificial Sequence
  Description of Artificial Sequence: Synthetic peptide
IYFTGNT

SEQ ID NO: 172 - protein, 12 aa, Artificial Sequence
  Description of Artificial Sequence: Synthetic peptide
GSLFGDYGYFDY

SEQ ID NO: 173 - protein, 6 aa, Artificial Sequence
  Description of Artificial Sequence: Synthetic peptide
QFISSN

SEQ ID NO: 174 - protein, 3 aa, Artificial Sequence
  Description of Artificial Sequence: Synthetic peptide
GAS

SEQ ID NO: 175 - protein, 9 aa, Artificial Sequence
  Description of Artificial Sequence: Synthetic peptide
QQYNNWPST

SEQ ID NO: 176 - protein, 8 aa, Artificial Sequence
  Description of Artificial Sequence: Synthetic peptide
GYTFNTYA

SEQ ID NO: 177 - protein, 8 aa, Artificial Sequence
  Description of Artificial Sequence: Synthetic peptide
INTNTGNP

SEQ ID NO: 178 - protein, 14 aa, Artificial Sequence
  Description of Artificial Sequence: Synthetic peptide
ARRYFDWLLGAFDI

SEQ ID NO: 179 - protein, 6 aa, Artificial Sequence
  Description of Artificial Sequence: Synthetic peptide
QGISSW

SEQ ID NO: 180 - protein, 9 aa, Artificial Sequence
  Description of Artificial Sequence: Synthetic peptide
QQANSFPLT

SEQ ID NO: 181 - protein, 8 aa, Artificial Sequence
  Description of Artificial Sequence: Synthetic peptide
GGTFSSYA

SEQ ID NO: 182 - protein, 8 aa, Artificial Sequence
  Description of Artificial Sequence: Synthetic peptide
ISAIFGTA

SEQ ID NO: 183 - protein, 16 aa, Artificial Sequence
  Description of Artificial Sequence: Synthetic peptide
ARGNSFHALWDYAFDY

SEQ ID NO: 184 - protein, 12 aa, Artificial Sequence
  Description of Artificial Sequence: Synthetic peptide
QSVLYSSNNKNY

SEQ ID NO: 185 - protein, 3 aa, Artificial Sequence
  Description of Artificial Sequence: Synthetic peptide
WAS

SEQ ID NO: 186 - protein, 9 aa, Artificial Sequence
  Description of Artificial Sequence: Synthetic peptide
QQYYSTPLT

SEQ ID NO: 187 - protein, 8 aa, Artificial Sequence
  Description of Artificial Sequence: Synthetic peptide
IIPIFGNA

SEQ ID NO: 188 - protein, 15 aa, Artificial Sequence
  Description of Artificial Sequence: Synthetic peptide
ARTIIYLDYVHILDY

SEQ ID NO: 189 - protein, 8 aa, Artificial Sequence
  Description of Artificial Sequence: Synthetic peptide
GFTFSNYW

SEQ ID NO: 190 - protein, 8 aa, Artificial Sequence
  Description of Artificial Sequence: Synthetic peptide
IRYDGGSK

SEQ ID NO: 191 - protein, 12 aa, Artificial Sequence
  Description of Artificial Sequence: Synthetic peptide
AKDAYPPYSFDY

SEQ ID NO: 192 - protein, 6 aa, Artificial Sequence
  Description of Artificial Sequence: Synthetic peptide
QSVSSY

SEQ ID NO: 193 - protein, 3 aa, Artificial Sequence
  Description of Artificial Sequence: Synthetic peptide
DAS

SEQ ID NO: 194 - protein, 9 aa, Artificial Sequence
  Description of Artificial Sequence: Synthetic peptide
QQRSNWPLT

SEQ ID NO: 195 - protein, 8 aa, Artificial Sequence
  Description of Artificial Sequence: Synthetic peptide
GFTFSSYA

SEQ ID NO: 196 - protein, 8 aa, Artificial Sequence
  Description of Artificial Sequence: Synthetic peptide
ISGSGGST

SEQ ID NO: 197 - protein, 14 aa, Artificial Sequence
  Description of Artificial Sequence: Synthetic peptide
AKGDEYYYPDPLDY

SEQ ID NO: 198 - protein, 6 aa, Artificial Sequence
  Description of Artificial Sequence: Synthetic peptide
QSISSY

SEQ ID NO: 199 - protein, 9 aa, Artificial Sequence
  Description of Artificial Sequence: Synthetic peptide
QQSYSTPLT

SEQ ID NO: 200 - protein, 12 aa, Artificial Sequence
  Description of Artificial Sequence: Synthetic peptide
AKEWSSYFGLDY

SEQ ID NO: 201 - protein, 8 aa, Artificial Sequence
  Description of Artificial Sequence: Synthetic peptide
ISPIFGTA

SEQ ID NO: 202 - protein, 15 aa, Artificial Sequence
  Description of Artificial Sequence: Synthetic peptide
ARRYDNFARSGDLDY

SEQ ID NO: 203 - protein, 9 aa, Artificial Sequence
  Description of Artificial Sequence: Synthetic peptide
QQYNNWPFT

SEQ ID NO: 204 - protein, 9 aa, Artificial Sequence
  Description of Artificial Sequence: Synthetic peptide
SSDVGDYNY

SEQ ID NO: 205 - protein, 3 aa, Artificial Sequence
  Description of Artificial Sequence: Synthetic peptide
DVS

SEQ ID NO: 206 - protein, 10 aa, Artificial Sequence
  Description of Artificial Sequence: Synthetic peptide
ASYAGNYNVV

SEQ ID NO: 207 - protein, 10 aa, Artificial Sequence
  Description of Artificial Sequence: Synthetic peptide
SSYAGNYNVV

SEQ ID NO: 208 - protein, 12 aa, Artificial Sequence
  Description of Artificial Sequence: Synthetic peptide
ARHLHNAIHLDY

SEQ ID NO: 209 - protein, 6 aa, Artificial Sequence
  Description of Artificial Sequence: Synthetic peptide
QSVSNF

SEQ ID NO: 210 - protein, 9 aa, Artificial Sequence
  Description of Artificial Sequence: Synthetic peptide
QQGKHWPWT

SEQ ID NO: 211 - protein, 448 aa, Artificial Sequence
  Description of Artificial Sequence: Synthetic polypeptide
EVQLVQSGAEVKKPGESLKISCKGSGYSFTSYWIGWVRQMPGKGLEWMGIIYPSDSYTRYSPSFQGQVTISADKSISTAYLQWSSLKASDTAMYYCARRNSAENYADLDYWGQGTLVTVSSASTKGPSVFPLAPCSRSTSESTAALGCLVKDYFPEPVTVSWNSGALTSGVHTFPAVLQSSGLYSLSSVVTVPSSSLGTKTYTCNVDHKPSNTKVDKRVESKYGPPCPPCPAPEAAGGPSVFLFPPKPKDTLMISRTPEVTCVVVDVSQEDPEVQFNWYVDGVEVHNAKTKPREEQFNSTYRVVSVLTVLHQDWLNGKEYKCKVSNKGLPSSIEKTISKAKGQPREPQVYTLPPSQEEMTKNQVSLTCLVKGFYPSDIAVEWESNGQPENNYKTTPPVLDSDGSFFLYSRLTVDKSRWQEGNVFSCSVMHEALHNHYTQKSLSLSLGK

SEQ ID NO: 212 - protein, 214 aa, Artificial Sequence
  Description of Artificial Sequence: Synthetic polypeptide
EIVLTQSPGTLSLSPGERATLSCRASQSISNDLNWYQQKPGKAPKLLIYYASSLQSGVPSRFSGSGSGTDFTLTINSLQPEDFATYYCQQSFTAPLTFGQGTKVEIKRTVAAPSVFIFPPSDEQLKSGTASVVCLLNNFYPREAKVQWKVDNALQSGNSQESVTEQDSKDSTYSLSSTLTLSKADYEKHKVYACEVTHQGLSSPVTKSFNRGEC

SEQ ID NO: 213 - protein, 445 aa, Artificial Sequence
  Description of Artificial Sequence: Synthetic polypeptide
EVQLLESGGGLVQPGGSLRLSCAASGFTFSNYAMNWVRQAPGKGLEWVSGINYGGGSKYYADSVKGRFTISRDNSKNTLYLQMNSLRAEDTAVYYCAKDYGPFALDYWGQGTLVTVSSASTKGPSVFPLAPCSRSTSESTAALGCLVKDYFPEPVTVSWNSGALTSGVHTFPAVLQSSGLYSLSSVVTVPSSSLGTKTYTCNVDHKPSNTKVDKRVESKYGPPCPPCPAPEAAGGPSVFLFPPKPKDTLMISRTPEVTCVVVDVSQEDPEVQFNWYVDGVEVHNAKTKPREEQFNSTYRVVSVLTVLHQDWLNGKEYKCKVSNKGLPSSIEKTISKAKGQPREPQVYTLPPSQEEMTKNQVSLTCLVKGFYPSDIAVEWESNGQPENNYKTTPPVLDSDGSFFLYSRLTVDKSRWQEGNVFSCSVMHEALHNHYTQKSLSLSLGK

SEQ ID NO: 214 - protein, 214 aa, Artificial Sequence
  Description of Artificial Sequence: Synthetic polypeptide
EIVLTQSPATLSLSPGERATLSCRASQSVDDWLAWYQQKPGQAPRLLIYTASNRATGIPARFSGSGSGTDFTLTISSLEPEDFAVYYCQQYHHWPLTFGQGTKVEIKRTVAAPSVFIFPPSDEQLKSGTASVVCLLNNFYPREAKVQWKVDNALQSGNSQESVTEQDSKDSTYSLSSTLTLSKADYEKHKVYACEVTHQGLSSPVTKSFNRGEC

SEQ ID NO: 215 - protein, 449 aa, Artificial Sequence
  Description of Artificial Sequence: Synthetic polypeptide
QLQLQESGPGLVKPSETLSLTCTVSGGSISSSTYYWGWIRQPPGKGLEWIGSIYFTGSTDYNPSLKSRVSISVDTSKNQFSLKLSSVTAADTAVYYCAKEDDSSGYYSFDYWGQGNLVTVSSASTKGPSVFPLAPCSRSTSESTAALGCLVKDYFPEPVTVSWNSGALTSGVHTFPAVLQSSGLYSLSSVVTVPSSSLGTKTYTCNVDHKPSNTKVDKRVESKYGPPCPPCPAPEAAGGPSVFLFPPKPKDTLMISRTPEVTCVVVDVSQEDPEVQFNWYVDGVEVHNAKTKPREEQFNSTYRVVSVLTVLHQDWLNGKEYKCKVSNKGLPSSIEKTISKAKGQPREPQVYTLPPSQEEMTKNQVSLTCLVKGFYPSDIAVEWESNGQPENNYKTTPPVLDSDGSFFLYSRLTVDKSRWQEGNVFSCSVMHEALHNHYTQKSLSLSLGK

SEQ ID NO: 216 - protein, 214 aa, Artificial Sequence
  Description of Artificial Sequence: Synthetic polypeptide
DIQLTQSPSFLSASVGDRVTITCRASQGISSYLAWYQQKPGKAPKLLIYAASTLQSGVPSRFSGSGSGTEFTLTISSLQPEDFATYYCQQVNSYPLTFGGGTKVEIKRTVAAPSVFIFPPSDEQLKSGTASVVCLLNNFYPREAKVQWKVDNALQSGNSQESVTEQDSKDSTYSLSSTLTLSKADYEKHKVYACEVTHQGLSSPVTKSFNRGEC

SEQ ID NO: 217 - protein, 448 aa, Artificial Sequence
  Description of Artificial Sequence: Synthetic polypeptide
QLQLQESGPGLVKPSETLSLTCTVSGVSISSSTYYWGWLRQPPGMGLEWTGSIYFTGNTYYNPSLKSRVTISVDTSRNQFSLKLSSVTAADTAVYYCGSLFGDYGYFDYWGQGTLVTVSSASTKGPSVFPLAPCSRSTSESTAALGCLVKDYFPEPVTVSWNSGALTSGVHTFPAVLQSSGLYSLSSVVTVPSSSLGTKTYTCNVDHKPSNTKVDKRVESKYGPPCPPCPAPEAAGGPSVFLFPPKPKDTLMISRTPEVTCVVVDVSQEDPEVQFNWYVDGVEVHNAKTKPREEQFNSTYRVVSVLTVLHQDWLNGKEYKCKVSNKGLPSSIEKTISKAKGQPREPQVYTLPPSQEEMTKNQVSLTCLVKGFYPSDIAVEVVESNGQPENNYKTTPPVLDSDGSFFLYSRLTVDKSRWQEGNVFSCSVMHEALHNHYTQKSLSLSLGK

SEQ ID NO: 218 - protein, 214 aa, Artificial Sequence
  Description of Artificial Sequence: Synthetic polypeptide
EIVMTQSPATLSVPPGERATLSCRASQFISSNLAWYQQKPGQAPRLLIYGASTRATGIPARFSGSGSGTDFTLTISSLQSEDFAVYYCQQYNNWPSTFGPGTKVDIKRTVAAPSVFIFPPSDEQLKSGTASVVCLLNNFYPREAKVQWKVDNALQSGNSQESVTEQDSKDSTYSLSSTLTLSKADYEKHKVYACEVTHQGLSSPVTKSFNRGEC

SEQ ID NO: 219 - protein, 448 aa, Artificial Sequence
  Description of Artificial Sequence: Synthetic polypeptide
QVQLVQSGSELKKPGASVKVSCKASGYTFNTYAMNWVRQAPGQGLEWMGWINTNTGNPTYAQGFTGRFVFSLDTSVSTAYLQISSLKAEDTAVYYCARRYFDWLLGAFDIWGQGTMVTVSSASTKGPSVFPLAPCSRSTSESTAALGCLVKDYFPEPVTVSWNSGALTSGVHTFPAVLQSSGLYSLSSVVTVPSSSLGTKTYTCNVDHKPSNTKVDKRVESKYGPPCPPCPAPEAAGGPSVFLFPPKPKDTLMISRTPEVTCVVVDVSQEDPEVQFNWYVDGVEVHNAKTKPREEQFNSTYRVVSVLTVLHQDWLNGKEYKCKVSNKGLPSSIEKTISKAKGQPREPQVYTLPPSQEEMTKNQVSLTCLVKGFYPSDIAVEWESNGQPENNYKTTPPVLDSDGSFFLYSRLTVDKSRWQEGNVFSCSVMHEALHNHYTQKSLSLSLGK

SEQ ID NO: 220 - protein, 214 aa, Artificial Sequence
  Description of Artificial Sequence: Synthetic polypeptide
DIQMTQSPSSVSASVGDRVTITCRASQGISSWLAWYQQKPGKAPKLLIYAASSLQSGVPSRFSGSGSGTDFTLTISSLQPEDFATYYCQQANSFPLTFGGGTKVEIKRTVAAPSVFIFPPSDEQLKSGTASVVCLLNNFYPREAKVQWKVDNALQSGNSQESVTEQDSKDSTYSLSSTLTLSKADYEKHKVYACEVTHQGLSSPVTKSFNRGEC

SEQ ID NO: 221 - protein, 450 aa, Artificial Sequence
  Description of Artificial Sequence: Synthetic polypeptide
QVQLVQSGAEVKKPGSSVKVSCKASGGTFSSYAISWVRQAPGQGLEWMGGISAIFGTANYAQKFQGRVTITADESTSTAYMELSSLRSEDTAVYYCARGNSFHALWDYAFDYWGQGTLVTVSSASTKGPSVFPLAPCSRSTSESTAALGCLVKDYFPEPVTVSWNSGALTSGVHTFPAVLQSSGLYSLSSVVTVPSSSLGTKTYTCNVDHKPSNTKVDKRVESKYGPPCPPCPAPEAAGGPSVFLFPPKPKDTLMISRTPEVTCVVVDVSQEDPEVQFNWYVDGVEVHNAKTKPREEQFNSTYRVVSVLTVLHQDWLNGKEYKCKVSNKGLPSSIEKTISKAKGQPREPQVYTLPPSQEEMTKNQVSLTCLVKGFYPSDIAVEWESNGQPENNYKTTPPVLDSDGSFFLYSRLTVDKSRWQEGNVFSCSVMHEALHNHYTQKSLSLSLGK

SEQ ID NO: 222 - protein, 220 aa, Artificial Sequence; identical to SEQ ID NO: 149
  Description of Artificial Sequence: Synthetic polypeptide

SEQ ID NO: 223 - protein, 449 aa, Artificial Sequence
  Description of Artificial Sequence: Synthetic polypeptide
QVQLVQSGAEVKKPGSSVKVSCKASGGTFSSYAISWVRQAPGQGLEWMGGIIPIFGNANYAQKFQGRVTITADESTSTAYMELSSLRSEDTAVYYCARTIIYLDYVHILDYWGQGTLVTVSSASTKGPSVFPLAPCSRSTSESTAALGCLVKDYFPEPVTVSWNSGALTSGVHTFPAVLQSSGLYSLSSVVTVPSSSLGTKTYTCNVDHKPSNTKVDKRVESKYGPPCPPCPAPEAAGGPSVFLFPPKPKDTLMISRTPEVTCVVVDVSQEDPEVQFNWYVDGVEVHNAKTKPREEQFNSTYRVVSVLTVLHQDWLNGKEYKCKVSNKGLPSSIEKTISKAKGQPREPQVYTLPPSQEEMTKNQVSLTCLVKGFYPSDIAVEWESNGQPENNYKTTPPVLDSDGSFFLYSRLTVDKSRWQEGNVFSCSVMHEALHNHYTQKSLSLSLGK

SEQ ID NO: 224 - protein, 446 aa, Artificial Sequence
  Description of Artificial Sequence: Synthetic polypeptide
EVQLLESGGGLVQPGGSLRLSCAASGFTFSNYWMNWVRQAPGKGLEWVSAIRYDGGSKYYADSVKGRFTISRDNSKNTLYLQMNSLRAEDTAVYYCAKDAYPPYSFDYWGQGTLVTVSSASTKGPSVFPLAPCSRSTSESTAALGCLVKDYFPEPVTVSWNSGALTSGVHTFPAVLQSSGLYSLSSVVTVPSSSLGTKTYTCNVDHKPSNTKVDKRVESKYGPPCPPCPAPEAAGGPSVFLFPPKPKDTLMISRTPEVTCVVVDVSQEDPEVQFNWYVDGVEVHNAKTKPREEQFNSTYRVVSVLTVLHQDWLNGKEYKCKVSNKGLPSSIEKTISKAKGQPREPQVYTLPPSQEEMTKNQVSLTCLVKGFYPSDIAVEWESNGQPENNYKTTPPVLDSDGSFFLYSRLTVDKSRWQEGNVFSCSVMHEALHNHYTQKSLSLSLGK

SEQ ID NO: 225 - protein, 214 aa, Artificial Sequence; identical to SEQ ID NO: 139
  Description of Artificial Sequence: Synthetic polypeptide

SEQ ID NO: 226 - protein, 448 aa, Artificial Sequence
  Description of Artificial Sequence: Synthetic polypeptide
EVQLLESGGGLVQPGGSLRLSCAASGFTFSSYAMSWVRQAPGKGLEWVSAISGSGGSTYYADSVKGRFTISRDNSKNTLYLQMNSLRAEDTAVYYCAKGDEYYYPDPLDYWGQGTLVTVSSASTKGPSVFPLAPCSRSTSESTAALGCLVKDYFPEPVTVSWNSGALTSGVHTFPAVLQSSGLYSLSSVVTVPSSSLGTKTYTCNVDHKPSNTKVDKRVESKYGPPCPPCPAPEAAGGPSVFLFPPKPKDTLMISRTPEVTCVVVDVSQEDPEVQFNWYVDGVEVHNAKTKPREEQFNSTYRVYSVLTVLHQDWLNGKEYKCKVSNKGLPSSIEKTISKAKGQPREPQVYTLPPSQEEMTKNQVSLTCLVKGFYPSDIAVEWESNGQPENNYKTTPPVLDSDGSFFLYSRLTVDKSRWQEGNVFSCSVMHEALHNHYTQKSLSLSLGK

SEQ ID NO: 227 - protein, 214 aa, Artificial Sequence; identical to SEQ ID NO: 137
  Description of Artificial Sequence: Synthetic polypeptide

SEQ ID NO: 228 - protein, 446 aa, Artificial Sequence
  Description of Artificial Sequence: Synthetic polypeptide
EVQLLESGGGLVQPGGSLRLSCAASGFTFSNYAMSWVRQAPGKGLEWVSAISGSGGSTYYADSVKGRFTISRDNSKNTLYLQMNSLRAEDTAVYYCAKEWSSYFGLDYWGQGTLVTVSSASTKGPSVFPLAPCSRSTSESTAALGCLVKDYFPEPVTVSWNSGALTSGVHTFPAVLQSSGLYSLSSVVTVPSSSLGTKTYTCNVDHKPSNTKVDKRVESKYGPPCPPCPAPEAAGGPSVFLFPPKPKDTLMISRTPEVTCVVVDVSQEDPEVQFNWYVDGVEVHNAKTKPREEQFNSTYRVVSVLTVLHQDWLNGKEYKCKVSNKGLPSSIEKTISKAKGQPREPQVYTLPPSQEEMTKNQVSLTCLVKGFYPSDIAVEWESNGQPENNYKTTPPVLDSDGSFFLYSRLTVDKSRWQEGNVFSCSVMHEALHNHYTQKSLSLSLGK

SEQ ID NO: 229 - protein, 449 aa, Artificial Sequence
  Description of Artificial Sequence: Synthetic polypeptide
QVQLVQSGAEVKKPGSSVKVSCKASGGTFSSYAISWVRQAPGQGLEWMGWISPIFGTANYAQKFQGRVTITADESTSTAYMELSSLRSEDTAVYYCARRYDNFARSGDLDYWGQGTLVTVSSASTKGPSVFPLAPCSRSTSESTAALGCLVKDYFPEPYTVSWNSGALTSGVHTFPAVLQSSGLYSLSSVVTVPSSSLGTKTYTCNVDHKPSNTKVDKRVESKYGPPCPPCPAPEAAGGPSVFLFPPKPKDTLMISRTPEVTCVVVDVSQEDPEVQFNWYVDGVEVHNAKTKPREEQFNSTYRVVSVLTVLHQDWLNGKEYKCKVSNKGLPSSIEKTISKAKGQPREPQVYTLPPSQEEMTKNQVSLTCLVKGFYPSDIAVEWESNGQPENNYKTTPPVLDSDGSFFLYSRLTVDKSRWQEGNVFSCSVMHEALHNHYTQKSLSLSLGK

SEQ ID NO: 230 - protein, 214 aa, Artificial Sequence
  Description of Artificial Sequence: Synthetic polypeptide
EIVMTQSPATLSVSPGERATLSCRASQFISSNLAWYQQKPGQAPRLLIYGASTRATGIPARFSGSGSGTDFTLTISSLQSEDFAVYYCQQYNNWPFTFGPGHCVDIKRTVAAPSVFIFPPSDEQLKSGTASVVCLLNNFYPREAKVQWKVDNALQSGNSQESVTEQDSKDSTYSLSSTLTLSKADYEKHKVYACEVTHQGLSSPVTKSFNRGEC

SEQ ID NO: 231 - protein, 216 aa, Artificial Sequence
  Description of Artificial Sequence: Synthetic polypeptide
QSALTQPRSVSGSPGHSVTISCTGTSSDVGDYNYVSWYQQRPGKVPKLLIYDVSKRPSGVPDRFSGSKSGNTASLTISGLQAEDEAIYFCASYAGNYNVVFGGGTKLTVLGQPKAAPSVTLFPPSSEELQANKATLVCLISDFYPGAVTVAWKADSSPVKAGVETTTPSKQSNNKYAASSYLSLTPEQWKSHRSYSCQVTHEGSTVEKTVAPTECS

SEQ ID NO: 232 - protein, 216 aa, Artificial Sequence
  Description of Artificial Sequence: Synthetic polypeptide
QSALTQPRSVSGSPGHSVTISCTGTSSDVGDYNYVSWYQQRPGKVPKLLIYDVSKRPSGVPDRFSGSKSGNTASLTISGLQAEDEAIYFCSSYAGNYNVVFGGGTKLTVLGQPKAAPSVTLFPPSSEELQANKATLVCLISDFYPGAVTVAWKADSSPVKAGVETTTPSKQSNNKYAASSYLSLTPEQWKSHRSYSCQVTHEGSTVEKTVAPTECS

SEQ ID NO: 233 - protein, 446 aa, Artificial Sequence
  Description of Artificial Sequence: Synthetic polypeptide
QVQLVQSGAEVKKPGSSVKVSCKASGGTFSSYAISWVRQAPGQGLEWMGGISAIFGTANYAQKFQGRVTITADESTSTAYMELSSLRSEDTAVYYCARHLHNAIHLDYWGQGTLVTVSSASTKGPSVFPLAPCSRSTSESTAALGCLVKDYFPEPVTVSWNSGALTSGVHTFPAVLQSSGLYSLSSVVTVPSSSLGTKTYTCNVDHKPSNTKVDKRVESKYGPPCPPCPAPEAAGGPSVFLFPPKPKDTLMISRTPEVTCVVVDVSQEDPEVQFNWYVDGVEVHNAKTKPREEQFNSTYRVVSVLTVLHQDWLNGKEYKCKVSNKGLPSSIEKTISKAKGQPREPQVYTLPPSQEEMTKNQVSLTCLVKGFYPSDLAVEWESNGQPENNYKTTPPVLDSDGSFFLYSRLTVDKSRWQEGNVFSCSVMHEALHNHYTQKSLSLSLGK

SEQ ID NO: 234 - protein, 214 aa, Artificial Sequence
  Description of Artificial Sequence: Synthetic polypeptide
EIVLTQSPATLSLSPGERATLSCRASQSVSNFLAWYQQKPGQAPRLLIYGASNRATGIPARFSGSGSGTDFTLTISSLEPEDFAVYYCQQGKHWPWTFGQGTKVEIKRTVAAPSVFIFPPSDEQLKSGTASVVCLLNNFYPREAKVQWKVDNALQSGNSQESVTEQDSKDSTYSLSSTLTLSKADYEKHKVYACEVTHQGLSSPVTKSFNRGEC

SEQ ID NO: 235-245 - skipped (11 entries)

SEQ ID NO: 246 - protein, 120 aa, Artificial Sequence
  Description of Artificial Sequence: Synthetic polypeptide
QITLKESGPTLVKPTQTLTLTCTFSGFSLSTSGMGVSWIRQPPGKALEWLAHIYWDDDKRYNPSLKSRLTITKDTSKNQVVLTMTNMDPVDTATYYCARLYGFTYGFAYWGQGTLVTVSS

SEQ ID NO: 247 - protein, 125 aa, Artificial Sequence
  Description of Artificial Sequence: Synthetic polypeptide
EVQLVESGGGLVQPGGSLRLSCAASGFTFNTYAMNWVRQAPGKGLEWVARIRSKYNNYATYYAASVKGRFTISRDDSKNSLYLQMNSLKTEDTAVYYCARHGNFGNSYVSWFAYWGQGTLVTVSS

SEQ ID NO: 248 - protein, 125 aa, Artificial Sequence
  Description of Artificial Sequence: Synthetic polypeptide
QLQLQESGPGLVNPSETLSHTCTVSGGSISSSSHYWGWIRQPPGKGLEWIGKIYYSGNTYYNPSLKSRVTISIDTSKNQFSLKMSSVTAADTAVYYCARLADVVVVPAARYFDSWGQGTLVTVSS

SEQ ID NO: 249 - protein, 122 aa, Artificial Sequence
  Description of Artificial Sequence: Synthetic polypeptide
QVQLQQSGPGLVKPSQTLSLTCAISGDSVSSNSAAWNWIRQSPSRGLEWLGRTYYRSKWYNDYAVSVRSRITINPDTSKNQFSLQLNSVTPEDTAVYHCARETMFRGLMDYWGQGTLVTVSS

SEQ ID NO: 250 - protein, 129 aa, Artificial Sequence
  Description of Artificial Sequence: Synthetic polypeptide
QVQLVESGGGVVQPGRSLRLSCAASGFTFSSYGMHWVRQSPGKGLEWVAVISYDGSNKYCADSVKGRFTISRDNSKSTLYLQMNSLRAEDTAVYYCAKDFRSLDWLPPDSTSYDGMDVWGQGTTVTVSS

SEQ ID NO: 251 - protein, 116 aa, Artificial Sequence
  Description of Artificial Sequence: Synthetic polypeptide
QVQLVQSGSELKKPGASVKVSCKASGYTFTNYAMNWVRQAPGQGLEWMGWINTNTGNPTYAQAFTGRFVFSLDTSVSTAYLQISSLKAEDTAVYYCARDREVRDYWGQGTLVTVSS

SEQ ID NO: 252 - protein, 125 aa, Artificial Sequence
  Description of Artificial Sequence: Synthetic polypeptide
QLQLQESGPGLVKPSETLSLTCTVSGGSIRSTNYYWGWIRQPPGKGLEWIGTIYYSGNTYYNPSLKSRVTISVDTSKNQFSLKLSSVTAADTAVYYCARLADVVVVPAARYFDYWGQGILVTVSS

SEQ ID NO: 253 - protein, 125 aa, Artificial Sequence
  Description of Artificial Sequence: Synthetic polypeptide
QLQLQESGPGLVKPSETLSLTCTVSGGSIRSSGFYWGWIRQPPRKGLEWIGTIYYSGNTYYNPSLKSRVTISVDTSKNQFSLKLSSVTAADTAVYFCARLADVVVVPAARYFDNWGQGTLVTVSS

SEQ ID NO: 254 - protein, 125 aa, Artificial Sequence
  Description of Artificial Sequence: Synthetic polypeptide
QLQLQESGPGLVKPSETLSLTCTVSGGSISTGRYYWGWIRQPPGKGVIWIGNIYYSGNTYYNPSLKSRVTISVDTSKNQFSLKLNSVTAADTAVYYCARLGSLVVVPAAMSFDYWGQGTLVTVSS

SEQ ID NO: 255 - protein, 125 aa, Artificial Sequence
  Description of Artificial Sequence: Synthetic polypeptide
QLQLQESGPGLVKPSETLSLTCTVSGGSIRGSSYYWGWVRQPPGKGLEWIGSIYSSGNTYYNPSLKSRVTISVDTSKNQFSLKLSSVTAADTALYYCARLGSLVVVPAAMSFDYWGQGTLVTVSS

SEQ ID NO: 256 - protein, 119 aa, Artificial Sequence
  Description of Artificial Sequence: Synthetic polypeptide
QVQLQESGPGLVKPSGTLSLTCAVSGGSISSSNWWSWVRQPPGRGLEWIGEIYHSGNTNNSPSLKSRVTISADKSKNQFSLKLSSVTAADTAVYFCARIIAVARYFDSWGQGTLVTVSS

SEQ ID NO: 257 - protein, 129 aa, Artificial Sequence
  Description of Artificial Sequence: Synthetic polypeptide
QVQLVESGGGVVQPGRSLRLSCAASGFTFSSYGMHWVRQAPGKGLEWVVVISYDGSNKYYADSVKGRFTISRDNSKNTLYLQMNSLRAEDTAVYYCAKDFRDFDWLPPDSTSYHGMDVWGQGTTVTVSS

SEQ ID NO: 258 - protein, 129 aa, Artificial Sequence
  Description of Artificial Sequence: Synthetic polypeptide
QVQLVESGGGVVQPGRSLRLSCVASGFTFSSYGMHWVRQAPGKGLEWVAVISYDGSNKYYADSVKGRFTISRDNSKNTLYLQMNSLRAEGTAVYYCAKDFRSFDWLPPDSASYHGMDVWGQGTTVTVSS

SEQ ID NO: 259 - protein, 120 aa, Artificial Sequence
  Description of Artificial Sequence: Synthetic polypeptide
EVQLLESGGGLVQPGGSLGLSCAASGFTFSGYAMSWVRQAPGKGLNWVSAIDYSGNDTYYADSVKGRFTISRDNSKNTLYLQMNSLRAEDTAVYYCAKESQLLHGLFEHWGQGILVTVSS

SEQ ID NO: 260 - skipped

SEQ ID NO: 261 - protein, 125 aa, Artificial Sequence
  Description of Artificial Sequence: Synthetic polypeptide
QLQLQESGPGLVKPSETLSLTCTVSGGSIRGSSYYWGWIRQPPGKGLEWIGSIYSSGNTYYNPSLKSRVTISVDTSKNQFSLKLSSVTAADTAVYYCARLGSLVVVPAAMSFDYWGQGTLVTVSS

SEQ ID NO: 262 - protein, 118 aa, Artificial Sequence
  Description of Artificial Sequence: Synthetic polypeptide
EVQLVESGGGLVQPGGSLRLSCAASGFTFSSYWMSWVRQAPGKGLEWVANIKQHGSEKYYVDSVKGRFTISRDNAKNSLYLQMNSLRAEDTAVYYCARDRDLGYFDYWGQGTLVTVSS

SEQ ID NO: 263 - protein, 119 aa, Artificial Sequence
  Description of Artificial Sequence: Synthetic polypeptide
EVQLLESGGGLVQPGGSLRLSCAASRFTFSSYAMTWVRQAPGKGLEWVSTINISGGSTYYADSVKGRFTISRDNSKNTLYLQMNSLRAEDTAVYYCTKGGYSSGPFDYWGQGTLVSVSS

SEQ ID NO: 264 - protein, 129 aa, Artificial Sequence
  Description of Artificial Sequence: Synthetic polypeptide
QVQLVESGGGVVQPGRSLRLSCAASRFTFSSYGMHWVRQAPGKGLEWVAVISYDGSNKYYADSVKGRFTISRDNSKNTLYLQMNSLRAEDTAVHYCAKDFRSFDWLPPDSASYHGMDVWGQGTTVTVSS

SEQ ID NO: 265 - protein, 121 aa, Artificial Sequence
  Description of Artificial Sequence: Synthetic polypeptide
EVQLLESGGGLVQPGGSLRLSCAASGFTFNYAMSWVRQAPGKGLEWVSAISGSGGSTYYADSVKGRFTISRDISKNTLYLQMNSLRAEDTAVYYCARTYNSGYYDGDFDYWGQGTLVTVSS

SEQ ID NO: 266 - protein, 129 aa, Artificial Sequence
  Description of Artificial Sequence: Synthetic polypeptide
QVQLVESGGGVVQPGRSLRLSCAASGFTFSSYGMHWVRQAPGKGLEWVAVISYDGSNKYYADSVKGRFTISRDNSKNTLFLQMNSLRAEDTAVYYCAKDFRYFDWLPPDSSSYYGMDVWGQGTTVTVSS

SEQ ID NO: 267 - protein, 117 aa, Artificial Sequence
  Description of Artificial Sequence: Synthetic polypeptide
QVQLVQSGSELRKPGASVKVSCKASGYTFTNYAMNWVRQAPGQGLEWMGWINTNTGNPTYAQGFTGRFVFSLDTSVSSAYLQISSLKAEDTAMYYCATDRDRGTDYWGQGTLVTVSS

SEQ ID NO: 268 - protein, 129 aa, Artificial Sequence
  Description of Artificial Sequence: Synthetic polypeptide
QVQLVESGGGVVQPGRSLRLSCAASGFTFSAYGMHWVRQAPGKGLEWVAVISYDGSNKYYADSVKGRFTISRDNSKNTLYLQMNSLRAEGTAVYYCAKDFRSFDWLPPDSASYHGMDVWGQGTTVTVSS

SEQ ID NO: 269 - protein, 129 aa, Artificial Sequence
  Description of Artificial Sequence: Synthetic polypeptide
QVQLVESGGGVVQPGRSLRLSCAASGFTFSSYGMHWVRQAPGKGLEWVAVISYDGSNKYYADSVKGRFTISRDNSKNTLYLQMNSLRAEDTAVYYCAKDFRSFDWLPPDSTSYYGMDVWGQGTTVTVSS

SEQ ID NO: 270 - protein, 118 aa, Artificial Sequence
  Description of Artificial Sequence: Synthetic polypeptide
EVQLVESGGGFVQPGGSLRLSCAASGFTFSSYWMSWVRQAPGKGLEWVANIKQHGSEKYYVDSVKGRFTISRDNVKNSLYLQMNSLRTEDTAVYYCARDRDLGYFDYWGQGTLVTVSS

SEQ ID NO: 271 - protein, 119 aa, Artificial Sequence
  Description of Artificial Sequence: Synthetic polypeptide
QVQLVQSGSELKKPGASVKVSCKASGYTLTRSAMNWVRQAPGQGLEWMGWINTNTGNPTYAQGFTGRFVFSLDTSVNTAYLLISSLKTEDTAVYYCASDILPGYHEDYWGQGTLVTVSS

SEQ ID NO: 272 - protein, 122 aa, Artificial Sequence
  Description of Artificial Sequence: Synthetic polypeptide
QVQLQQSGPGLVKPSQTLSLTCAISGDSVSSNSAAWNWIRQSPSRGLEWLGRTYYRSKWYNDYALSVQSRITINPDTSKNQFSLQLNSVTPEDTAVYYCAREVAVAASFDYWGQGTLVTVSS

SEQ ID NO: 273 - protein, 125 aa, Artificial Sequence
  Description of Artificial Sequence: Synthetic polypeptide
QLQLQESGPGLVKPSETLSLTCTVSGGSISSRSHYWGWIRQPPGVGLEWIGSIYYTGSTYYNPSLKSRVTISVDTSKNQFSLKLSSVTAADTAVYYCARLADIVVVPAARYFDYWGQGTLVTVSS

SEQ ID NO: 274 - protein, 125 aa, Artificial Sequence
  Description of Artificial Sequence: Synthetic polypeptide
QLQLQESGPGLVKPSETLSLTCTVSGGSIRSSSYYWGWIRQPPGKGPEWIGSIYSSGNTYYNPSLKSRVTISVDTSKNQFSLKLISMTAADTAVFYCARLAATIVVPAARYFDCWGQGTLVTVSS

SEQ ID NO: 275 - protein, 118 aa, Artificial Sequence
  Description of Artificial Sequence: Synthetic polypeptide
EVQLVESGGGFVQPGGSLRLSCAASGFTFSSYWMSWVRQAPGKGLEWVANIKQHGSEKYYVDSVKGRFTISRDNAKNSLYLQMNSLRAEDTAVYYCARDRDLGYFDYWGQGTLVTVSS

SEQ ID NO: 276 - protein, 117 aa, Artificial Sequence
  Description of Artificial Sequence: Synthetic polypeptide
EVQLVESGGGLVQPGGSLRLSCAASGFTFSSYWMTWVRPAPGKGLEWVANIKRDGGEKYYVDSVKGRFTISRDNAANSLYLQMNSLRVEDTAVYYCARPFYDHFDYWGQGTLVTVSS

SEQ ID NO: 277 - protein, 117 aa, Artificial Sequence
  Description of Artificial Sequence: Synthetic polypeptide
QVQLVQSGSELKKPGASVKVSCKASGYTFSTYAMNWVRQAPGQGLEWMGWINTNTGNPTYAQGFTGRFVFSLDTSVSTAYLQISSLKAEDTAVYYCARDRDRGTDYWGQGTLVTVSS

SEQ ID NO: 278 - protein, 119 aa, Artificial Sequence
  Description of Artificial Sequence: Synthetic polypeptide
EVQLVESGGGLVQPGRSLRLSCVASGFTFDDYAIHWVRQAPGKGLEWVSGLSWNGGNIGYADSVKGRFTISRDNAKNSLYLQMNSLKTEDTAFYYCTKDTPYGDYFDYWGQGTLVTVSS

SEQ ID NO: 279 - protein, 119 aa, Artificial Sequence
  Description of Artificial Sequence: Synthetic polypeptide
EVQLVESGGGLVQPGRSLRLSCAGSGFTFDDYAIHWVRQAPGKGLEWVSGLSWNGGNIGYADSVKGRFTISRDNAKNSLYLQLNSLKTEDTAFYYCAKDSPYGDYFDYWGQGTLVTVSS

SEQ ID NO: 280 - protein, 119 aa, Artificial Sequence
  Description of Artificial Sequence: Synthetic polypeptide
EVQLVESGGGLVQPGRSLRLSCAASGFTFDDYAMHWVRQAPGKGLEWVSGIGWSGGSIVYADSVKGRFKISRDNAKNSLYLQMNSLRAEDTALYYCAKDSPYGDFFDYWGQGTLVTVSS

SEQ ID NO: 281 - protein, 119 aa, Artificial Sequence
  Description of Artificial Sequence: Synthetic polypeptide
EVQLVESGGGLVQPGRSLRLSCAASGFTFDDYAMHWVRQAPGKGLEWVSGIGWSGGSIVYADSVKGRFTISRDNAKNSLYLQMNSLRAEDTALYYCAKDSPYGDFFDYWGQGTLVTVSS

SEQ ID NO: 282 - protein, 120 aa, Artificial Sequence
  Description of Artificial Sequence: Synthetic polypeptide
EVQLLESGGGLVQPGGSLKLSCTASGFTFRSYAMSWVRQAPGKGLEWVSAINGYGDGRYYADSVKGRFTISRDNSKNTLYLQMNSLRAEDTAVYSCAKDQGFGELFFDYWGQGTLVTVSS

SEQ ID NO: 283 - protein, 117 aa, Artificial Sequence
  Description of Artificial Sequence: Synthetic polypeptide
QVQLVESGGGVVQPGRSLRLSCAASGFTFSYYGMHWVRQAPDKGLEWVAVIWFDGNNKYYADSVKGRFTISRDNSKNTLYLQMNSLRAEDTAVYYCARDRELLFDYWGQGTLVTVSS

SEQ ID NO: 284 - protein, 129 aa, Artificial Sequence
  Description of Artificial Sequence: Synthetic polypeptide
EVQLVESGGGLVQPGRSLRLSCAASGFTFDDYAMHWVRQVPGEGLEWVSGISWNGGDMVYADSVKGRFTISRDNAKNSLYLQMNSLRPEDTALYYCVKDMPYFDFLTGSDYYYYGMDVWGQGTTVTVSS

SEQ ID NO: 285 - protein, 117 aa, Artificial Sequence
  Description of Artificial Sequence: Synthetic polypeptide
QVQLVESGGGVVQPGRSLRLSCATSGFTFSNYGMHWVRQAPGKGLEWVAVIWYVGSHKYYADSVKGRFTISRDNSKNTLYLQMNSLRAEDTAVYYCARDGSLCFDYWGQGTLVTVSS

SEQ ID NO: 286 - protein, 111 aa, Artificial Sequence
  Description of Artificial Sequence: Synthetic polypeptide
DIVMTQSPDSLAVSLGERATINCRASQSVDYNGISYMHWYQQKPGQPPKLLIYAASNPESGVPDRFSGSGSGTDFTLTISSLQAEDVAVYYCQQIIEDPWTFGQGTKVEIK

SEQ ID NO: 287 - protein, 109 aa, Artificial Sequence
  Description of Artificial Sequence: Synthetic polypeptide
QTVVTQEPSLTVSPGGTVTLTCRSSTGAVTTSNYANWVQQKPGQAPRGLIGGTNKRAPGTPARFSGSLLGGKAALTLSGVQPEDEAEYYCALWYSNLWVFGGGTKLTVL

SEQ ID NO: 288 - protein, 106 aa, Artificial Sequence
  Description of Artificial Sequence: Synthetic polypeptide
SYELTQPPSVSVSPGQTASIICSGDKLGNKYACWYQQKPGQSPVLVIYQDSKRPSGIPERFSGSNSGNTATLTISGTQAVDEADYYCQAWDSSTYVFGTGTKVTVL

SEQ ID NO: 289 - protein, 107 aa, Artificial Sequence
  Description of Artificial Sequence: Synthetic polypeptide
SYVLTQPPSVSVAPGQTARITCGGSNIGSKSVHWYQQKPGQAPVMVVYDDSDRPSGIPERFSGSNSGNTATLTISRVEAGDEADYYCQVWDSSSDVVFGGGTKLTVL

SEQ ID NO: 290 - protein, 106 aa, Artificial Sequence
  Description of Artificial Sequence: Synthetic polypeptide
SYELTQPPSVSVSPGQTASITCSGHKLGDKYACWYQQKPGQSPVVVIYKDSKRPSGIPERFSGSNFGNTATLTISGTQAMDEADYYCQAWDSSTVVFGGGTKLTVL

SEQ ID NO: 291 - protein, 106 aa, Artificial Sequence
  Description of Artificial Sequence: Synthetic polypeptide
SYELTQPPSVSVSPGQTASITCSGDKLGDKYACWYQQKPGQSPVLVIYQDSKRPSGIPERFSGSNSGNTATLTISGTQAMDEADYYCQAWDSSTVVFGGGTKLTVL

SEQ ID NO: 292 - protein, 106 aa, Artificial Sequence
  Description of Artificial Sequence: Synthetic polypeptide
SYELTQPPSVSVSPGQTASITCSGDKLGDKYACWYQQKPGQSPVLVIYQDYKRPSGIPERFSGSNSGNTATLTISGTQAMDEADYYCQAWDSSTYVFGTGTKVTVL

SEQ ID NO: 293 - protein, 106 aa, Artificial Sequence
  Description of Artificial Sequence: Synthetic polypeptide
SYELTQPPSVSVSPGQTASITCSGDKLGDKYACWYQQKPGQSPVLVIYQDYKRPSGIPERFSGSNSGNTATLTISGTQTMDEADYYCQAWDISTYVFGTGTKVTVL

SEQ ID NO: 294 - protein, 106 aa, Artificial Sequence
  Description of Artificial Sequence: Synthetic polypeptide
SYELTQPPSVSVSPGQTASITCSGDKLGDKYACWYQLRPGQSPILVIYQDSNRPSGIPERFSGSNSGNTATLTISGTQAMDEADYYCQAWDSSTWVFGGGTKLTVL

SEQ ID NO: 295 - protein, 106 aa, Artificial Sequence
  Description of Artificial Sequence: Synthetic polypeptide
SYELTQPPSVSVSPGQTASITCSGDKLGDKYACWYQQKPGQSPVLVIYQDSKRPSGIPERFSGSNSGNTATLTISGTQAMDEADYYCQAWDSSTWVFGGGTKLTVL

SEQ ID NO: 296 - protein, 108 aa, Artificial Sequence
  Description of Artificial Sequence: Synthetic polypeptide
SYVLTQPPSVSVAPGQTARITCGGNNIGIKSVHWYQQKPGQAPVLVVYDDSDRPPGIPERFSGSNSGNTATLTITRVEAGDEADYYCQVWDSSSDHVVFGGGTKLTVL

SEQ ID NO: 297 - protein, 106 aa, Artificial Sequence
  Description of Artificial Sequence: Synthetic polypeptide
SYELTQPPSVSVSPGQTASITCSGDKLGDKYACWYQQKPGQSPVVVIYQDRKRPSGIPERFSGSNFGNTATLTISGTQAMDEADYYCQAWDSSTVVFGGGTKLTVL

SEQ ID NO: 298 - protein, 106 aa, Artificial Sequence
  Description of Artificial Sequence: Synthetic polypeptide
SYELTQPPSVSVSPGQTASITCSGDKLGDKYACWYQQKPGQSPVLVIYQDGKRPSGIPERFSGSNFGNKATLTISGTQAMDEADYYCQAWDRNTVVFGGGTKLTVL

SEQ ID NO: 299 - protein, 113 aa, Artificial Sequence
  Description of Artificial Sequence: Synthetic polypeptide
DIVMTQSPDSLAVSLGERATINCKSSQSVLYSSNNKNYLAWYQQKAGQPPKLLIYWASTRESGVPDRFSGSGSGTDFILIISSLQAEDVAVYYCQQYYGTPWTFGQGTKVEIK

SEQ ID NO: 300 - protein, 107 aa, Artificial Sequence
  Description of Artificial Sequence: Synthetic polypeptide
DIQMTQSPSSVSASVGDRVTITCRASQGISSWLAWYQQKPGKAPKLLIYAASSLQSGVPSRFSGSGSGTDFTLTISSLQPEDFATYYCQQANSFPFTFGPGTKVDIK

SEQ ID NO: 301 - protein, 106 aa, Artificial Sequence
  Description of Artificial Sequence: Synthetic polypeptide
SYELTQPPSVSVSPGQTASITCSGNKLGAKFASWYQQKPGQSPVLVIYQDNKRPSGIPERFSGSNSGNTATLTISGTQAVDEADYYCQAWDSSTVVFGGGTKLTVL

SEQ ID NO: 302 - protein, 107 aa, Artificial Sequence
  Description of Artificial Sequence: Synthetic polypeptide
SYELTQPPSVSVSPGQTASITCSGDKLGDKYVRWYQQKTGQSPVLVMYQDSKRPSGIRERFYGSNSGNTATPTISGTQAVDEAEYYCQAWDSSTGVVFGGGTKLTVL

SEQ ID NO: 303 - protein, 106 aa, Artificial Sequence
  Description of Artificial Sequence: Synthetic polypeptide
SYELTQPPSVSVPPGQTASITCSGDKLGDKYACWYQQKPGQSPVLVIYQDNKRPSGIPERFSGSNSGNTATLTISGTQAMDEADYYCQAWGRNTVVFGGGTKLTVL

SEQ ID NO: 304 - protein, 111 aa, Artificial Sequence
  Description of Artificial Sequence: Synthetic polypeptide
QSALTQPASVSGSPGQSIPISSTGTSSDDGKNNIVSWYQQHPGKAPKLMIYKDSKRPSGVSNRFSGSKSGNTASLTISGLQADDEADYHCCSYAGASNHVVFGGGTKLTVL

SEQ ID NO: 305 - protein, 106 aa, Artificial Sequence
  Description of Artificial Sequence: Synthetic polypeptide
SYELTQPPSVSVSPGQTASITCSGDELGNKYACWYQQKPGQSPVVVVYQDRKRPSGIPERFSGSNFGNTATLTISGTQAMDEADYYCQAWDSSTVVFGGGTKLTVL

SEQ ID NO: 306 - protein, 111 aa, Artificial Sequence
  Description of Artificial Sequence: Synthetic polypeptide
QSALTQPASVSGSPGQSITISCTGTSSDVGDYNYVSWYQQHPGKVPKLMIYDVSNRPSGVSNRFSGSMSGNTASLTISGLQAEDEADYYCSSYSSSSALEVFGGGTKLTVL

SEQ ID NO: 307 - protein, 106 aa, Artificial Sequence
  Description of Artificial Sequence: Synthetic polypeptide
SYELTQPPSVSVSPGQTASITCSGDKLGDKYACWYQQKPGQSPVLVIYQDNKRPSGIPERFSGSNSGNTATLTISGTQAMDEADYYCQAWDSNTVVFGGGTKLTVL

SEQ ID NO: 308 - protein, 106 aa, Artificial Sequence
  Description of Artificial Sequence: Synthetic polypeptide
SYELTQPPSVSVSPGQTASITCSGDKLGDKYVCWYQQKPGQSPVVVIHQDRKRPSGIPERFSGSNFGNTATLTISGTQAMDEADYYCQAWDSSTVVFGGGTKLTVL

SEQ ID NO: 309 - protein, 106 aa, Artificial Sequence
  Description of Artificial Sequence: Synthetic polypeptide
SYELTQPPSVSVSPGQTASITCSGDKLGNKYASWYQQKPGQSPVLVIYQDTKRPSGIPERVSGSNSGNTATLTISGTQAMDEADYHCQAWDSSTVVFGGGTKLTVL

SEQ ID NO: 310 - protein, 111 aa, Artificial Sequence
  Description of Artificial Sequence: Synthetic polypeptide
QSALTQPASVSGSPGQSITISCTGINSDVGSYDLVSWYQQHPGKAPKLLIYDGSERPSGVFGRFSGSKSDNTTSLTISGLQAEDEAAYYCCSYEVTTTYVVFGGGTKLTVL

SEQ ID NO: 311 - protein, 108 aa, Artificial Sequence
  Description of Artificial Sequence: Synthetic polypeptide
SYVLTQPPSVSVAPGQTARITCGGNNIGSKSVHWSQQKPGQAPVLVVYDDSDRPSGIPERFSGSNSGNTATLTISRVEAGDEADYYCQVWDSNSDHVVFGGGTKLTVL

SEQ ID NO: 312 - protein, 106 aa, Artificial Sequence
  Description of Artificial Sequence: Synthetic polypeptide
SYELTQPPSVSVSPGQTASITCSGDKLGDKYACWYQQKPGQSPVLVIYQDSNRPSGIPERFSGSNSGNTATLTISETQAMDEADYYCQAWDSSTYVFGTGTKVTVL

SEQ ID NO: 313 - protein, 106 aa, Artificial Sequence
  Description of Artificial Sequence: Synthetic polypeptide
SYELTQPPSVSVSPGQTVSISCSGDRLGDKYACWYQQKPGQSPVLVIYQDSKRPSGIPERFSGSNSGNTATLTISGTQAMDEADYYCQAWDSSSYVFGTGTKVTVL

SEQ ID NO: 314 - protein, 106 aa, Artificial Sequence
  Description of Artificial Sequence: Synthetic polypeptide
SYELTQPPSVSVSPGQTASITCSGDKLGSKFACWYQQKPGQSPVLVIYQDSKRPSGIPERFSGSNSGNTATLTISGTQAMDEADYYCQAWDSSTVVFGGGTKLTVL

SEQ ID NO: 315 - protein, 108 aa, Artificial Sequence
  Description of Artificial Sequence: Synthetic polypeptide
SYVLTQPPSVAVAPGQTARITCGGSNIGKISVHWYQQKAGQAPVLVVHDDRARPSGIPERLSGSNSGTTATLTISRVEVGDEADYYCQVWNSSSVHPVFGGGTKLTVL

SEQ ID NO: 316 - protein, 111 aa, Artificial Sequence
  Description of Artificial Sequence: Synthetic polypeptide
QSALTQPASVSGSPGQSITISCTGTSSDVGDDNYVSWYQQHPGKAPKLMIYDVSNRPSGVSNRFSGSKSGNTASLTISGLQSEDEADYYCSSYSSSTTLEVFGGGTKLTVL

SEQ ID NO: 317 - protein, 107 aa, Artificial Sequence
  Description of Artificial Sequence: Synthetic polypeptide
DIQMTQSPSSVWASVGDRVTITCRASQGISSWLAWYQQQPGKAPNLLIYRSSSLQSGVPSRFSGSGSGTDFTLTISSLQPEDFATYYCQQDNSFPYTFGQGTKLEIK

SEQ ID NO: 318 - protein, 107 aa, Artificial Sequence
  Description of Artificial Sequence: Synthetic polypeptide
DIQMTQSPSSEWASVGDRVTITCRASQGISSWLAWYQQKPGKAPKLLIYGASSWQSGVPSRFSGSGSGTDFTLTISSLQPEDFATYYCQQDNSFPYTFGQGTKLEIK

SEQ ID NO: 319 - protein, 113 aa, Artificial Sequence
  Description of Artificial Sequence: Synthetic polypeptide
DIVMTQSPDSLAVSLGERATINCKSSQTVLYSSNNKNYLAWYQQKPGQPPKLLISWASTRKSGVPDRFSGSGSGTDFTLTVSSLQAEDVAVYYCQHYYSTPYTFGQGTKLEIK

SEQ ID NO: 320 - protein, 113 aa, Artificial Sequence
  Description of Artificial Sequence: Synthetic polypeptide
DIVMTQSPDSLAVSLGERATINCKSSQTVFYSSNNKNYLAWYQQKPGQPPKLLISWASTRKSGVPDRFSGSGSGTDFTLTVSSLQAEDVAVYYCQHYYSTPYTFGQGTKLEIK

SEQ ID NO: 321 - protein, 107 aa, Artificial Sequence
  Description of Artificial Sequence: Synthetic polypeptide
DIQMTQSPSTLSASVGDRVTITCRASQSISSWLAWYQQKPGKAPKLLIYKASSLESGVPSRFSGSGSGTEFTLTISSLQPDDFATYCCQQYNSYPWTFGQGTKVEIK

SEQ ID NO: 322 - protein, 106 aa, Artificial Sequence
  Description of Artificial Sequence: Synthetic polypeptide
SYELTQPPSVSVSPGQTASITCSGDELGDMYACWYQQKPGQSPLVVIYQDSKRPSGIPERFSGSNSGNTATLTISGTQAMDEAAYYCQTWDTRIAVFGGGTNLTVL

SEQ ID NO: 323 - protein, 106 aa, Artificial Sequence
  Description of Artificial Sequence: Synthetic polypeptide
SYELTQPPSVSVSPGQTASITCSGDNLGNEHVCWYHQKPGQSPVLVIYQNNKRPSGIPERFSGSNSGNTATLSISGTQATDEADYYCQAWDSTTAVFGGGTKLTVL

SEQ ID NO: 324 - protein, 106 aa, Artificial Sequence
  Description of Artificial Sequence: Synthetic polypeptide
SYELTQPPSVSVSPGQTANISCSGVTLGYNYAYWYQQKPGQSPILVISQDTQRPSGIPERFSGSNSGNTATLTISGTQAMDEAAYYCQAWDITTVLFGGGTKLTVL

SEQ ID NO: 325 - protein, 106 aa, Artificial Sequence
  Description of Artificial Sequence: Synthetic polypeptide
SYELTQPPSVSVSPGQTASITCSGDKLGDKYASWYQQKPGQSPVLVIYQDGKRPSGIPERFSGSNFGNKATLTISGTQAMDEADYYCQAWDRNTVVFGGGTKLTVL

SEQ ID NO: 326 - protein, 106 aa, Artificial Sequence
  Description of Artificial Sequence: Synthetic polypeptide
SYELTQPPSVSVSPGQTASITCSGDKLGNKYASWYQQKPGQSPVLVIYQDSKRPSGIPERFSGSNSGNTATLTISGTQAMDEADYYCQAWDSSTVVFGGGTKLTVL

SEQ ID NO: 327 - protein, 10 aa, Artificial Sequence
  Description of Artificial Sequence: Synthetic peptide
GFSLSTSGMG

SEQ ID NO: 328 - protein, 8 aa, Artificial Sequence
  Description of Artificial Sequence: Synthetic peptide
GFTFNTYA

SEQ ID NO: 329 - protein, 10 aa, Artificial Sequence
  Description of Artificial Sequence: Synthetic peptide
GDSVFNNNAA

SEQ ID NO: 330 - protein, 10 aa, Artificial Sequence
  Description of Artificial Sequence: Synthetic peptide
GGSISSSSHY

SEQ ID NO: 331 - protein, 10 aa, Artificial Sequence
  Description of Artificial Sequence: Synthetic peptide
GDSVSSNSAA

SEQ ID NO: 332 - protein, 8 aa, Artificial Sequence
  Description of Artificial Sequence: Synthetic peptide
GFTFSSYG

SEQ ID NO: 333 - protein, 8 aa, Artificial Sequence
  Description of Artificial Sequence: Synthetic peptide
GYTFTNYA

SEQ ID NO: 334 - protein, 10 aa, Artificial Sequence
  Description of Artificial Sequence: Synthetic peptide
GGSIRSTNYY

SEQ ID NO: 335 - protein, 10 aa, Artificial Sequence
  Description of Artificial Sequence: Synthetic peptide
GGSIRSSGFY

SEQ ID NO: 336 - protein, 10 aa, Artificial Sequence
  Description of Artificial Sequence: Synthetic peptide
GGSISTGRYY

SEQ ID NO: 337 - protein, 10 aa, Artificial Sequence
  Description of Artificial Sequence: Synthetic peptide
GGSIRGSSYY

SEQ ID NO: 338 - protein, 9 aa, Artificial Sequence
  Description of Artificial Sequence: Synthetic peptide
GGSISSSNW

SEQ ID NO: 339 - protein, 8 aa, Artificial Sequence
  Description of Artificial Sequence: Synthetic peptide
GFTFSSYG

SEQ ID NO: 340 - protein, 8 aa, Artificial Sequence
  Description of Artificial Sequence: Synthetic peptide
GFTFSSYG

SEQ ID NO: 341 - protein, 8 aa, Artificial Sequence
  Description of Artificial Sequence: Synthetic peptide
GFTFSGYA

SEQ ID NO: 342 - protein, 10 aa, Artificial Sequence
  Description of Artificial Sequence: Synthetic peptide
GGSISSSSYY

SEQ ID NO: 343 - protein, 10 aa, Artificial Sequence
  Description of Artificial Sequence: Synthetic peptide
GGSIRGSSYY

SEQ ID NO: 344 - protein, 8 aa, Artificial Sequence
  Description of Artificial Sequence: Synthetic peptide
GFTFSSYW

SEQ ID NO: 345 - protein, 8 aa, Artificial Sequence
  Description of Artificial Sequence: Synthetic peptide
RFTFSSYA

SEQ ID NO: 346 - protein, 8 aa, Artificial Sequence
  Description of Artificial Sequence: Synthetic peptide
RFTFSSYG

SEQ ID NO: 347 - protein, 7 aa, Artificial Sequence
  Description of Artificial Sequence: Synthetic peptide
GFTFNYA

SEQ ID NO: 348 - protein, 8 aa, Artificial Sequence
  Description of Artificial Sequence: Synthetic peptide
GFTFSSYG

SEQ ID NO: 349 - protein, 8 aa, Artificial Sequence
  Description of Artificial Sequence: Synthetic peptide
GYTFTNYA

SEQ ID NO: 350 - protein, 8 aa, Artificial Sequence
  Description of Artificial Sequence: Synthetic peptide
GFTFSAYG

SEQ ID NO: 351 - protein, 8 aa, Artificial Sequence
  Description of Artificial Sequence: Synthetic peptide
GFTFSSYG

SEQ ID NO: 352 - protein, 8 aa, Artificial Sequence
  Description of Artificial Sequence: Synthetic peptide
GFTFSSYW

SEQ ID NO: 353 - protein, 8 aa, Artificial Sequence
  Description of Artificial Sequence: Synthetic peptide
GYTLTRSA

SEQ ID NO: 354 - protein, 10 aa, Artificial Sequence
  Description of Artificial Sequence: Synthetic peptide
GDSVSSNSAA

SEQ ID NO: 355 - protein, 10 aa, Artificial Sequence
  Description of Artificial Sequence: Synthetic peptide
GGSISSRSHY

SEQ ID NO: 356 - protein, 10 aa, Artificial Sequence
  Description of Artificial Sequence: Synthetic peptide
GGSIRSSSYY

SEQ ID NO: 357 - protein, 8 aa, Artificial Sequence
  Description of Artificial Sequence: Synthetic peptide
GFTFSSYW

SEQ ID NO: 358 - protein, 8 aa, Artificial Sequence
  Description of Artificial Sequence: Synthetic peptide
GFTFSSYW

SEQ ID NO: 359 - protein, 8 aa, Artificial Sequence
  Description of Artificial Sequence: Synthetic peptide
GYTFSTYA

SEQ ID NO: 360 - protein, 8 aa, Artificial Sequence
  Description of Artificial Sequence: Synthetic peptide
GFTFDDYA

SEQ ID NO: 361 - protein, 8 aa, Artificial Sequence
  Description of Artificial Sequence: Synthetic peptide
GFTFDDYA

SEQ ID NO: 362 - protein, 8 aa, Artificial Sequence
  Description of Artificial Sequence: Synthetic peptide
GFTFDDYA

SEQ ID NO: 363 - protein, 8 aa, Artificial Sequence
  Description of Artificial Sequence: Synthetic peptide
GFTFDDYA

SEQ ID NO: 364 - protein, 8 aa, Artificial Sequence
  Description of Artificial Sequence: Synthetic peptide
GFTFRSYA

SEQ ID NO: 365 - protein, 8 aa, Artificial Sequence
  Description of Artificial Sequence: Synthetic peptide
GFTFSYYG

SEQ ID NO: 366 - protein, 8 aa, Artificial Sequence
  Description of Artificial Sequence: Synthetic peptide
GFTFDDYA

SEQ ID NO: 367 - protein, 8 aa, Artificial Sequence
  Description of Artificial Sequence: Synthetic peptide
GFTFSNYG

SEQ ID NO: 368 - protein, 7 aa, Artificial Sequence
  Description of Artificial Sequence: Synthetic peptide
IYWDDDK

SEQ ID NO: 369 - protein, 10 aa, Artificial Sequence
  Description of Artificial Sequence: Synthetic peptide
IRSKYNNYAT

SEQ ID NO: 370 - protein, 9 aa, Artificial Sequence
  Description of Artificial Sequence: Synthetic peptide
TYYRSKWLY

SEQ ID NO: 371 - protein, 7 aa, Artificial Sequence
  Description of Artificial Sequence: Synthetic peptide
IYYSGNT

SEQ ID NO: 372 - protein, 9 aa, Artificial Sequence
  Description of Artificial Sequence: Synthetic peptide
TYYRSKWYN

SEQ ID NO: 373 - protein, 8 aa, Artificial Sequence
  Description of Artificial Sequence: Synthetic peptide
ISYDGSNK

SEQ ID NO: 374 - protein, 8 aa, Artificial Sequence
  Description of Artificial Sequence: Synthetic peptide
INTNTGNP

SEQ ID NO: 375 - protein, 7 aa, Artificial Sequence
  Description of Artificial Sequence: Synthetic peptide
IYYSGNT

SEQ ID NO: 376 - protein, 7 aa, Artificial Sequence
  Description of Artificial Sequence: Synthetic peptide
IYYSGNT

SEQ ID NO: 377 - protein, 7 aa, Artificial Sequence
  Description of Artificial Sequence: Synthetic peptide
IYYSGNT

SEQ ID NO: 378 - protein, 7 aa, Artificial Sequence
  Description of Artificial Sequence: Synthetic peptide
IYSSGNT

SEQ ID NO: 379 - protein, 7 aa, Artificial Sequence
  Description of Artificial Sequence: Synthetic peptide
IYHSGNT

SEQ ID NO: 380 - protein, 8 aa, Artificial Sequence
  Description of Artificial Sequence: Synthetic peptide
ISYDGSNK

SEQ ID NO: 381 - protein, 8 aa, Artificial Sequence
  Description of Artificial Sequence: Synthetic peptide
ISYDGSNK

SEQ ID NO: 382 - protein, 8 aa, Artificial Sequence
  Description of Artificial Sequence: Synthetic peptide
IDYSGNDT

SEQ ID NO: 383 - protein, 7 aa, Artificial Sequence
  Description of Artificial Sequence: Synthetic peptide
INYSGST

SEQ ID NO: 384 - protein, 7 aa, Artificial Sequence
  Description of Artificial Sequence: Synthetic peptide
IYSSGNT

SEQ ID NO: 385 - protein, 8 aa, Artificial Sequence
  Description of Artificial Sequence: Synthetic peptide
IKQHGSEK

SEQ ID NO: 386 - protein, 8 aa, Artificial Sequence
  Description of Artificial Sequence: Synthetic peptide
INISGGST

SEQ ID NO: 387 - protein, 8 aa, Artificial Sequence
  Description of Artificial Sequence: Synthetic peptide
ISYDGSNK

SEQ ID NO: 388 - protein, 8 aa, Artificial Sequence
  Description of Artificial Sequence: Synthetic peptide
ISGSGGST

SEQ ID NO: 389 - protein, 8 aa, Artificial Sequence
  Description of Artificial Sequence: Synthetic peptide
ISYDGSNK

SEQ ID NO: 390 - protein, 8 aa, Artificial Sequence
  Description of Artificial Sequence: Synthetic peptide
INTNTGNP

SEQ ID NO: 391 - protein, 8 aa, Artificial Sequence
  Description of Artificial Sequence: Synthetic peptide
ISYDGSNK

SEQ ID NO: 392 - protein, 8 aa, Artificial Sequence
  Description of Artificial Sequence: Synthetic peptide
ISYDGSNK

SEQ ID NO: 393 - protein, 8 aa, Artificial Sequence
  Description of Artificial Sequence: Synthetic peptide
IKQHGSEK

SEQ ID NO: 394 - protein, 8 aa, Artificial Sequence
  Description of Artificial Sequence: Synthetic peptide
INTNTGNP

SEQ ID NO: 395 - protein, 9 aa, Artificial Sequence
  Description of Artificial Sequence: Synthetic peptide
TYYRSKWYN

SEQ ID NO: 396 - protein, 7 aa, Artificial Sequence
  Description of Artificial Sequence: Synthetic peptide
IYYTGST

SEQ ID NO: 397 - protein, 7 aa, Artificial Sequence
  Description of Artificial Sequence: Synthetic peptide
IYSSGNT

SEQ ID NO: 398 - protein, 8 aa, Artificial Sequence
  Description of Artificial Sequence: Synthetic peptide
IKQHGSEK

SEQ ID NO: 399 - protein, 8 aa, Artificial Sequence
  Description of Artificial Sequence: Synthetic peptide
IKRDGGEK

SEQ ID NO: 400 - protein, 8 aa, Artificial Sequence
  Description of Artificial Sequence: Synthetic peptide
INTNTGNP

SEQ ID NO: 401 - protein, 8 aa, Artificial Sequence
  Description of Artificial Sequence: Synthetic peptide
LSWNGGNI

SEQ ID NO: 402 - protein, 8 aa, Artificial Sequence
  Description of Artificial Sequence: Synthetic peptide
LSWNGGNI

SEQ ID NO: 403 - protein, 8 aa, Artificial Sequence
  Description of Artificial Sequence: Synthetic peptide
IGWSGGSI

SEQ ID NO: 404 - protein, 8 aa, Artificial Sequence
  Description of Artificial Sequence: Synthetic peptide
IGWSGGSI

SEQ ID NO: 405 - protein, 8 aa, Artificial Sequence
  Description of Artificial Sequence: Synthetic peptide
INGYGDGR

SEQ ID NO: 406 - protein, 8 aa, Artificial Sequence
  Description of Artificial Sequence: Synthetic peptide
IWFDGNNK

SEQ ID NO: 407 - protein, 8 aa, Artificial Sequence
  Description of Artificial Sequence: Synthetic peptide
ISWNGGDM

SEQ ID NO: 408 - protein, 8 aa, Artificial Sequence
  Description of Artificial Sequence: Synthetic peptide
IWYVGSHK

SEQ ID NO: 409 - protein, 12 aa, Artificial Sequence
  Description of Artificial Sequence: Synthetic peptide
ARLYGFTYGFAY

SEQ ID NO: 410 - protein, 16 aa, Artificial Sequence
  Description of Artificial Sequence: Synthetic peptide
ARHGNFGNSYVSWFAY

SEQ ID NO: 411 - protein, 10 aa, Artificial Sequence
  Description of Artificial Sequence: Synthetic peptide
ARGYSSSFDY

SEQ ID NO: 412 - protein, 17 aa, Artificial Sequence
  Description of Artificial Sequence: Synthetic peptide
ARLADVVVVPAARYFDS

SEQ ID NO: 413 - protein, 12 aa, Artificial Sequence
  Description of Artificial Sequence: Synthetic peptide
ARETMFRGLMDY

SEQ ID NO: 414 - protein, 22 aa, Artificial Sequence
  Description of Artificial Sequence: Synthetic peptide
AKDFRSLDWLPPDSTSYDGMDV

SEQ ID NO: 415 - protein, 9 aa, Artificial Sequence
  Description of Artificial Sequence: Synthetic peptide
ARDREVRDY

SEQ ID NO: 416 - protein, 17 aa, Artificial Sequence
  Description of Artificial Sequence: Synthetic peptide
ARLADVVVVPAARYFDY

SEQ ID NO: 417 - protein, 17 aa, Artificial Sequence
  Description of Artificial Sequence: Synthetic peptide
ARLADVVVVPAARYFDN

SEQ ID NO: 418 - protein, 17 aa, Artificial Sequence
  Description of Artificial Sequence: Synthetic peptide
ARLGSLVVVPAAMSFDY

SEQ ID NO: 419 - protein, 17 aa, Artificial Sequence
  Description of Artificial Sequence: Synthetic peptide
ARLGSLVVVPAAMSFDY

SEQ ID NO: 420 - protein, 12 aa, Artificial Sequence
  Description of Artificial Sequence: Synthetic peptide
ARIIAVARYFDS

SEQ ID NO: 421 - protein, 22 aa, Artificial Sequence
  Description of Artificial Sequence: Synthetic peptide
AKDFRDFDWLPPDSTSYHGMDV

SEQ ID NO: 422 - protein, 22 aa, Artificial Sequence
  Description of Artificial Sequence: Synthetic peptide
AKDFRSFDWLPPDSASYHGMDV

SEQ ID NO: 423 - protein, 13 aa, Artificial Sequence
  Description of Artificial Sequence: Synthetic peptide
AKESQLLHGLFEH

SEQ ID NO: 424 - protein, 12 aa, Artificial Sequence
  Description of Artificial Sequence: Synthetic peptide
ARLDGYESPFDY

SEQ ID NO: 425 - protein, 17 aa, Artificial Sequence
  Description of Artificial Sequence: Synthetic peptide
ARLGSLVVVPAAMSFDY

SEQ ID NO: 426 - protein, 11 aa, Artificial Sequence
  Description of Artificial Sequence: Synthetic peptide
ARDRDLGYFDY

SEQ ID NO: 427 - protein, 12 aa, Artificial Sequence
  Description of Artificial Sequence: Synthetic peptide
TKGGYSSGPFDY

SEQ ID NO: 428 - protein, 22 aa, Artificial Sequence
  Description of Artificial Sequence: Synthetic peptide
AKDFRSFDWLPPDSASYHGMDV

SEQ ID NO: 429 - protein, 15 aa, Artificial Sequence
  Description of Artificial Sequence: Synthetic peptide
ARTYNSGYYDGDFDY

SEQ ID NO: 430 - protein, 22 aa, Artificial Sequence
  Description of Artificial Sequence: Synthetic peptide
AKDFRYFDWLPPDSSSYYGMDV

SEQ ID NO: 431 - protein, 10 aa, Artificial Sequence
  Description of Artificial Sequence: Synthetic peptide
ATDRDRGTDY

SEQ ID NO: 432 - protein, 22 aa, Artificial Sequence
  Description of Artificial Sequence: Synthetic peptide
AKDFRSFDWLPPDSASYHGMDV

SEQ ID NO: 433 - protein, 22 aa, Artificial Sequence
  Description of Artificial Sequence: Synthetic peptide
AKDFRSFDWLPPDSTSYYGMDV

SEQ ID NO: 434 - protein, 11 aa, Artificial Sequence
  Description of Artificial Sequence: Synthetic peptide
ARDRDLGYFDY

SEQ ID NO: 435 - protein, 12 aa, Artificial Sequence
  Description of Artificial Sequence: Synthetic peptide
ASDILPGYHEDY

SEQ ID NO: 436 - protein, 12 aa, Artificial Sequence
  Description of Artificial Sequence: Synthetic peptide
AREVAVAASFDY

SEQ ID NO: 437 - protein, 17 aa, Artificial Sequence
  Description of Artificial Sequence: Synthetic peptide
ARLADIVVVPAARYFDY

SEQ ID NO: 438 - protein, 17 aa, Artificial Sequence
  Description of Artificial Sequence: Synthetic peptide
ARLAATIVVPAARYFDC

SEQ ID NO: 439 - protein, 11 aa, Artificial Sequence
  Description of Artificial Sequence: Synthetic peptide
ARDRDLGYFDY

SEQ ID NO: 440 - protein, 10 aa, Artificial Sequence
  Description of Artificial Sequence: Synthetic peptide
ARPFYDHFDY

SEQ ID NO: 441 - protein, 10 aa, Artificial Sequence
  Description of Artificial Sequence: Synthetic peptide
ARDRDRGTDY

SEQ ID NO: 442 - protein, 12 aa, Artificial Sequence
  Description of Artificial Sequence: Synthetic peptide
TKDTPYGDYFDY

SEQ ID NO: 443 - protein, 12 aa, Artificial Sequence
  Description of Artificial Sequence: Synthetic peptide
AKDSPYGDYFDY

SEQ ID NO: 444 - protein, 12 aa, Artificial Sequence
  Description of Artificial Sequence: Synthetic peptide
AKDSPYGDFFDY

SEQ ID NO: 445 - protein, 12 aa, Artificial Sequence
  Description of Artificial Sequence: Synthetic peptide
AKDSPYGDFFDY

SEQ ID NO: 446 - protein, 13 aa, Artificial Sequence
  Description of Artificial Sequence: Synthetic peptide
AKDQGFGELFFDY

SEQ ID NO: 447 - protein, 10 aa, Artificial Sequence
  Description of Artificial Sequence: Synthetic peptide
ARDRELLFDY

SEQ ID NO: 448 - protein, 22 aa, Artificial Sequence
  Description of Artificial Sequence: Synthetic peptide
VKDMPYFDFLTGSDYYYYGMDV

SEQ ID NO: 449 - protein, 10 aa, Artificial Sequence
  Description of Artificial Sequence: Synthetic peptide
ARDGSLCFDY

SEQ ID NO: 450 - protein, 10 aa, Artificial Sequence
  Description of Artificial Sequence: Synthetic peptide
QSVDYNGISY

SEQ ID NO: 451 - protein, 9 aa, Artificial Sequence
  Description of Artificial Sequence: Synthetic peptide
TGAVTTSNY

SEQ ID NO: 452 - protein, 9 aa, Artificial Sequence
  Description of Artificial Sequence: Synthetic peptide
SSNIGTYKF

SEQ ID NO: 453 - protein, 6 aa, Artificial Sequence
  Description of Artificial Sequence: Synthetic peptide
KLGNKY

SEQ ID NO: 454 - protein, 6 aa, Artificial Sequence
  Description of Artificial Sequence: Synthetic peptide
NIGSKS

SEQ ID NO: 455 - protein, 6 aa, Artificial Sequence
  Description of Artificial Sequence: Synthetic peptide
KLGDKY

SEQ ID NO: 456 - protein, 6 aa, Artificial Sequence
  Description of Artificial Sequence: Synthetic peptide
KLGDKY

SEQ ID NO: 457 - protein, 6 aa, Artificial Sequence
  Description of Artificial Sequence: Synthetic peptide
KLGDKY

SEQ ID NO: 458 - protein, 6 aa, Artificial Sequence
  Description of Artificial Sequence: Synthetic peptide
KLGDKY

SEQ ID NO: 459 - protein, 6 aa, Artificial Sequence
  Description of Artificial Sequence: Synthetic peptide
KLGDKY

SEQ ID NO: 460 - protein, 6 aa, Artificial Sequence
  Description of Artificial Sequence: Synthetic peptide
KLGDKY

SEQ ID NO: 461 - protein, 6 aa, Artificial Sequence
  Description of Artificial Sequence: Synthetic peptide
NIGIKS

SEQ ID NO: 462 - protein, 6 aa, Artificial Sequence
  Description of Artificial Sequence: Synthetic peptide
KLGDKY

SEQ ID NO: 463 - protein, 6 aa, Artificial Sequence
  Description of Artificial Sequence: Synthetic peptide
KLGDKY

SEQ ID NO: 464 - protein, 12 aa, Artificial Sequence
  Description of Artificial Sequence: Synthetic peptide
QSVLYSSNNKNY

SEQ ID NO: 465 - protein, 6 aa, Artificial Sequence
  Description of Artificial Sequence: Synthetic peptide
QGISSW

SEQ ID NO: 466 - protein, 6 aa, Artificial Sequence
  Description of Artificial Sequence: Synthetic peptide
KLGAKF

SEQ ID NO: 467 - protein, 6 aa, Artificial Sequence
  Description of Artificial Sequence: Synthetic peptide
KLGDKY

SEQ ID NO: 468 - protein, 6 aa, Artificial Sequence
  Description of Artificial Sequence: Synthetic peptide
KLGDKY

SEQ ID NO: 469 - protein, 9 aa, Artificial Sequence
  Description of Artificial Sequence: Synthetic peptide
SSDDGKNNI

SEQ ID NO: 470 - protein, 6 aa, Artificial Sequence
  Description of Artificial Sequence: Synthetic peptide
ELGNKY

SEQ ID NO: 471 - protein, 9 aa, Artificial Sequence
  Description of Artificial Sequence: Synthetic peptide
SSDVGDYNY

SEQ ID NO: 472 - protein, 6 aa, Artificial Sequence
  Description of Artificial Sequence: Synthetic peptide
KLGDKY

SEQ ID NO: 473 - protein, 6 aa, Artificial Sequence
  Description of Artificial Sequence: Synthetic peptide
KLGDKY

SEQ ID NO: 474 - protein, 6 aa, Artificial Sequence
  Description of Artificial Sequence: Synthetic peptide
KLGNKY

SEQ ID NO: 475 - protein, 9 aa, Artificial Sequence
  Description of Artificial Sequence: Synthetic peptide
NSDVGSYDL

SEQ ID NO: 476 - protein, 6 aa, Artificial Sequence
  Description of Artificial Sequence: Synthetic peptide
NIGSKS

SEQ ID NO: 477 - protein, 6 aa, Artificial Sequence
  Description of Artificial Sequence: Synthetic peptide
KLGDKY

SEQ ID NO: 478 - protein, 6 aa, Artificial Sequence
  Description of Artificial Sequence: Synthetic peptide
RLGDKY

SEQ ID NO: 479 - protein, 6 aa, Artificial Sequence
  Description of Artificial Sequence: Synthetic peptide
KLGSKF

SEQ ID NO: 480 - protein, 6 aa, Artificial Sequence
  Description of Artificial Sequence: Synthetic peptide
NIGKIS

SEQ ID NO: 481 - protein, 9 aa, Artificial Sequence
  Description of Artificial Sequence: Synthetic peptide
SSDVGDDNY

SEQ ID NO: 482 - protein, 6 aa, Artificial Sequence
  Description of Artificial Sequence: Synthetic peptide
QGISSW

SEQ ID NO: 483 - protein, 6 aa, Artificial Sequence
  Description of Artificial Sequence: Synthetic peptide
QGISSW

SEQ ID NO: 484 - protein, 12 aa, Artificial Sequence
  Description of Artificial Sequence: Synthetic peptide
QTVLYSSNNKNY

SEQ ID NO: 485 - protein, 12 aa, Artificial Sequence
  Description of Artificial Sequence: Synthetic peptide
QTVFYSSNNKNY

SEQ ID NO: 486 - protein, 6 aa, Artificial Sequence
  Description of Artificial Sequence: Synthetic peptide
QSISSW

SEQ ID NO: 487 - protein, 6 aa, Artificial Sequence
  Description of Artificial Sequence: Synthetic peptide
ELGDMY

SEQ ID NO: 488 - protein, 6 aa, Artificial Sequence
  Description of Artificial Sequence: Synthetic peptide
NLGNEH

SEQ ID NO: 489 - protein, 6 aa, Artificial Sequence
  Description of Artificial Sequence: Synthetic peptide
TLGYNY

SEQ ID NO: 490 - protein, 6 aa, Artificial Sequence
  Description of Artificial Sequence: Synthetic peptide
KLGDKY

SEQ ID NO: 491 - protein, 6 aa, Artificial Sequence
  Description of Artificial Sequence: Synthetic peptide
KLGNKY

SEQ ID NO: 492 - protein, 3 aa, Artificial Sequence
  Description of Artificial Sequence: Synthetic peptide
AAS

SEQ ID NO: 493 - protein, 3 aa, Artificial Sequence
  Description of Artificial Sequence: Synthetic peptide
GTN

SEQ ID NO: 494 - protein, 3 aa, Artificial Sequence
  Description of Artificial Sequence: Synthetic peptide
EVS

SEQ ID NO: 495 - protein, 3 aa, Artificial Sequence
  Description of Artificial Sequence: Synthetic peptide
QDS

SEQ ID NO: 496 - protein, 3 aa, Artificial Sequence
  Description of Artificial Sequence: Synthetic peptide
DDS

SEQ ID NO: 497 - protein, 3 aa, Artificial Sequence
  Description of Artificial Sequence: Synthetic peptide
KDS

SEQ ID NO: 498 - protein, 3 aa, Artificial Sequence
  Description of Artificial Sequence: Synthetic peptide
QDS

SEQ ID NO: 499 - protein, 3 aa, Artificial Sequence
  Description of Artificial Sequence: Synthetic peptide
QDY

SEQ ID NO: 500 - protein, 3 aa, Artificial Sequence
  Description of Artificial Sequence: Synthetic peptide
QDY

SEQ ID NO: 501 - protein, 3 aa, Artificial Sequence
  Description of Artificial Sequence: Synthetic peptide
QDS

SEQ ID NO: 502 - protein, 3 aa, Artificial Sequence
  Description of Artificial Sequence: Synthetic peptide
QDS

SEQ ID NO: 503 - protein, 3 aa, Artificial Sequence
  Description of Artificial Sequence: Synthetic peptide
DDS

SEQ ID NO: 504 - protein, 3 aa, Artificial Sequence
  Description of Artificial Sequence: Synthetic peptide
QDR

SEQ ID NO: 505 - protein, 3 aa, Artificial Sequence
  Description of Artificial Sequence: Synthetic peptide
QDG

SEQ ID NO: 506 - protein, 3 aa, Artificial Sequence
  Description of Artificial Sequence: Synthetic peptide
WAS

SEQ ID NO: 507 - protein, 3 aa, Artificial Sequence
  Description of Artificial Sequence: Synthetic peptide
AAS

SEQ ID NO: 508 - protein, 3 aa, Artificial Sequence
  Description of Artificial Sequence: Synthetic peptide
QDN

SEQ ID NO: 509 - protein, 3 aa, Artificial Sequence
  Description of Artificial Sequence: Synthetic peptide
QDS

SEQ ID NO: 510 - protein, 3 aa, Artificial Sequence
  Description of Artificial Sequence: Synthetic peptide
QDN

SEQ ID NO: 511 - protein, 3 aa, Artificial Sequence
  Description of Artificial Sequence: Synthetic peptide
KDS

SEQ ID NO: 512 - protein, 3 aa, Artificial Sequence
  Description of Artificial Sequence: Synthetic peptide
QDR

SEQ ID NO: 513 - protein, 3 aa, Artificial Sequence
  Description of Artificial Sequence: Synthetic peptide
DVS

SEQ ID NO: 514 - protein, 3 aa, Artificial Sequence
  Description of Artificial Sequence: Synthetic peptide
QDN

SEQ ID NO: 515 - protein, 3 aa, Artificial Sequence
  Description of Artificial Sequence: Synthetic peptide
QDR

SEQ ID NO: 516 - protein, 3 aa, Artificial Sequence
  Description of Artificial Sequence: Synthetic peptide
QDT

SEQ ID NO: 517 - protein, 3 aa, Artificial Sequence
  Description of Artificial Sequence: Synthetic peptide
DGS

SEQ ID NO: 518 - protein, 3 aa, Artificial Sequence
  Description of Artificial Sequence: Synthetic peptide
DDS

SEQ ID NO: 519 - protein, 3 aa, Artificial Sequence
  Description of Artificial Sequence: Synthetic peptide
QDS

SEQ ID NO: 520 - protein, 3 aa, Artificial Sequence
  Description of Artificial Sequence: Synthetic peptide
QDS

SEQ ID NO: 521 - protein, 3 aa, Artificial Sequence
  Description of Artificial Sequence: Synthetic peptide
QDS

SEQ ID NO: 522 - protein, 3 aa, Artificial Sequence
  Description of Artificial Sequence: Synthetic peptide
DDR

SEQ ID NO: 523 - protein, 3 aa, Artificial Sequence
  Description of Artificial Sequence: Synthetic peptide
DVS

SEQ ID NO: 524 - protein, 3 aa, Artificial Sequence
  Description of Artificial Sequence: Synthetic peptide
RSS

SEQ ID NO: 525 - protein, 3 aa, Artificial Sequence
  Description of Artificial Sequence: Synthetic peptide
GAS

SEQ ID NO: 526 - protein, 3 aa, Artificial Sequence
  Description of Artificial Sequence: Synthetic peptide
WAS

SEQ ID NO: 527 - protein, 3 aa, Artificial Sequence
  Description of Artificial Sequence: Synthetic peptide
WAS

SEQ ID NO: 528 - protein, 3 aa, Artificial Sequence
  Description of Artificial Sequence: Synthetic peptide
KAS

SEQ ID NO: 529 - protein, 3 aa, Artificial Sequence
  Description of Artificial Sequence: Synthetic peptide
QDS

SEQ ID NO: 530 - protein, 3 aa, Artificial Sequence
  Description of Artificial Sequence: Synthetic peptide
QNN

SEQ ID NO: 531 - protein, 3 aa, Artificial Sequence
  Description of Artificial Sequence: Synthetic peptide
QDT

SEQ ID NO: 532 - protein, 3 aa, Artificial Sequence
  Description of Artificial Sequence: Synthetic peptide
QDG

SEQ ID NO: 533 - protein, 3 aa, Artificial Sequence
  Description of Artificial Sequence: Synthetic peptide
QDS

SEQ ID NO: 534 - protein, 9 aa, Artificial Sequence
  Description of Artificial Sequence: Synthetic peptide
QQIIEDPWT

SEQ ID NO: 535 - protein, 9 aa, Artificial Sequence
  Description of Artificial Sequence: Synthetic peptide
ALWYSNLWV

SEQ ID NO: 536 - protein, 10 aa, Artificial Sequence
  Description of Artificial Sequence: Synthetic peptide
VSYAGSGTLL

SEQ ID NO: 537 - protein, 9 aa, Artificial Sequence
  Description of Artificial Sequence: Synthetic peptide
QAWDSSTYV

SEQ ID NO: 538 - protein, 10 aa, Artificial Sequence
  Description of Artificial Sequence: Synthetic peptide
QVWDSSSDVV

SEQ ID NO: 539 - protein, 9 aa, Artificial Sequence
  Description of Artificial Sequence: Synthetic peptide
QAWDSSTVV

SEQ ID NO: 540 - protein, 9 aa, Artificial Sequence
  Description of Artificial Sequence: Synthetic peptide
QAWDSSTVV

SEQ ID NO: 541 - protein, 9 aa, Artificial Sequence
  Description of Artificial Sequence: Synthetic peptide
QAWDSSTYV

SEQ ID NO: 542 - protein, 9 aa, Artificial Sequence
  Description of Artificial Sequence: Synthetic peptide
QAWDISTYV

SEQ ID NO: 543 - protein, 9 aa, Artificial Sequence
  Description of Artificial Sequence: Synthetic peptide
QAWDSSTWV

SEQ ID NO: 544 - protein, 9 aa, Artificial Sequence
  Description of Artificial Sequence: Synthetic peptide
QAWDSSTWV

SEQ ID NO: 545 - protein, 11 aa, Artificial Sequence
  Description of Artificial Sequence: Synthetic peptide
QVWDSSSDHVV

SEQ ID NO: 546 - protein, 9 aa, Artificial Sequence
  Description of Artificial Sequence: Synthetic peptide
QAWDSSTVV

SEQ ID NO: 547 - protein, 9 aa, Artificial Sequence
  Description of Artificial Sequence: Synthetic peptide
QAWDRNTVV

SEQ ID NO: 548 - protein, 9 aa, Artificial Sequence
  Description of Artificial Sequence: Synthetic peptide
QQYYGTPWT

SEQ ID NO: 549 - protein, 9 aa, Artificial Sequence
  Description of Artificial Sequence: Synthetic peptide
QQANSFPFT

SEQ ID NO: 550 - protein, 9 aa, Artificial Sequence
  Description of Artificial Sequence: Synthetic peptide
QAWDSSTVV

SEQ ID NO: 551 - protein, 10 aa, Artificial Sequence
  Description of Artificial Sequence: Synthetic peptide
QAWDSSTGVV

SEQ ID NO: 552 - protein, 9 aa, Artificial Sequence
  Description of Artificial Sequence: Synthetic peptide
QAWGRNTVV

SEQ ID NO: 553 - protein, 11 aa, Artificial Sequence
  Description of Artificial Sequence: Synthetic peptide
CSYAGASNHVV

SEQ ID NO: 554 - protein, 9 aa, Artificial Sequence
  Description of Artificial Sequence: Synthetic peptide
QAWDSSTVV

SEQ ID NO: 555 - protein, 11 aa, Artificial Sequence
  Description of Artificial Sequence: Synthetic peptide
SSYSSSSALEV

SEQ ID NO: 556 - protein, 9 aa, Artificial Sequence
  Description of Artificial Sequence: Synthetic peptide
QAWDSNTVV

SEQ ID NO: 557 - protein, 9 aa, Artificial Sequence
  Description of Artificial Sequence: Synthetic peptide
QAWDSSTVV

SEQ ID NO: 558 - protein, 9 aa, Artificial Sequence
  Description of Artificial Sequence: Synthetic peptide
QAWDSSTVV

SEQ ID NO: 559 - protein, 11 aa, Artificial Sequence
  Description of Artificial Sequence: Synthetic peptide
CSYEVTTTYVV

SEQ ID NO: 560 - protein, 11 aa, Artificial Sequence
  Description of Artificial Sequence: Synthetic peptide
QVWDSNSDHVV

SEQ ID NO: 561 - protein, 9 aa, Artificial Sequence
  Description of Artificial Sequence: Synthetic peptide
QAWDSSTYV

SEQ ID NO: 562 - protein, 9 aa, Artificial Sequence
  Description of Artificial Sequence: Synthetic peptide
QAWDSSSYV

SEQ ID NO: 563 - protein, 9 aa, Artificial Sequence
  Description of Artificial Sequence: Synthetic peptide
QAWDSSTVV

SEQ ID NO: 564 - protein, 11 aa, Artificial Sequence
  Description of Artificial Sequence: Synthetic peptide
QVWNSSSVHPV

SEQ ID NO: 565 - protein, 11 aa, Artificial Sequence
  Description of Artificial Sequence: Synthetic peptide
SSYSSSTTLEV

SEQ ID NO: 566 - protein, 9 aa, Artificial Sequence
  Description of Artificial Sequence: Synthetic peptide
QQDNSFPYT

SEQ ID NO: 567 - protein, 9 aa, Artificial Sequence
  Description of Artificial Sequence: Synthetic peptide
QQDNSFPYT

SEQ ID NO: 568 - protein, 9 aa, Artificial Sequence
  Description of Artificial Sequence: Synthetic peptide
QHYYSTPYT

SEQ ID NO: 569 - protein, 9 aa, Artificial Sequence
  Description of Artificial Sequence: Synthetic peptide
QHYYSTPYT

SEQ ID NO: 570 - protein, 9 aa, Artificial Sequence
  Description of Artificial Sequence: Synthetic peptide
QQYNSYPWT

SEQ ID NO: 571 - protein, 9 aa, Artificial Sequence
  Description of Artificial Sequence: Synthetic peptide
QTWDTRIAV

SEQ ID NO: 572 - protein, 9 aa, Artificial Sequence
  Description of Artificial Sequence: Synthetic peptide
QAWDSTTAV

SEQ ID NO: 573 - protein, 9 aa, Artificial Sequence
  Description of Artificial Sequence: Synthetic peptide
QAWDITTVL

SEQ ID NO: 574 - protein, 9 aa, Artificial Sequence
  Description of Artificial Sequence: Synthetic peptide
QAWDRNTVV

SEQ ID NO: 575 - protein, 334 aa, Homo sapiens
FPTSLSDCQTPTGWNCSGYDDRENDLFLCDTNTCKFDGECLRIGDTVTCVCQFKCNNDYVPVCGSNGESYQNECYLRQAACKQQSEILVVSEGSCATDAGSGSGDGVHEGSGETSQKETSTCDICQFGAECDEDAEDVWCVCNIDCSQTNFNPLCASDGKSYDNACQIKEASCQKQEKIEVMSLGRCQDNTTTTTKSEDGHYARTDYAENANKLEESAREHHIPCPEHYNGFCMHGKCEHSINMQEPSCRCDAGYTGQHCEKKDYSVLYVVPGPVRFQYVLIAAVIGTIQIAVICVVVLCITRKCPRSNRIHRQKQNTGHYSSDNTTRASTRLI

SEQ ID NO: 576 - skipped

SEQ ID NO: 577 - protein, 41 aa, Unknown
  Description of Unknown: TMEFF2 sequence
HHIPCPEHYNGFCMHGKCEHSINMQEPSCRCDAGYTGQHCE

SEQ ID NO: 578 - protein, 304 aa, Artificial Sequence
  Description of Artificial Sequence: Synthetic polypeptide
FPTSLSDCQTPTGWNCSGYDDRENDLFLCDTNTCKFDGECLRIGDTVTCVCQFKCNNDYVPVCGSNGESYQNECYLRQAACKQQSEILVVSEGSCATDAGSGSGDGVHEGSGETSQKETSTCDICQFGAECDEDAEDVWCVCNIDCSQTNFNPLCASDGKSYDNACQIKEASCQKQEKIEVMSLGRCQDNTTTTTKSEDGHYARTDYAENANKLEESAREHHIPCPEHYNGFCMHGKCEHSINMQEPSCRCDAGYTGQHCEKKDYSVLYVVPGPVRFQYVGGGSHHHHHHLNDIFEAQKIEWHE

SEQ ID NO: 579 - protein, 797 aa, Artificial Sequence
  Description of Artificial Sequence: Synthetic polypeptide
SGETSQKETSTCDICQFGAECDEDAEDVWCVCNIDCSQTNFNPLCASDGKSYDNACQIKEASCQKQEKIEVMSLGRCQDNTTTTTKSEDGHYARTDYAENANKLEESAREHHIPCPEHYNGFCMHGKCEHSINMQEPSCRCDAGYTGQHCEKKDYSVLYVVPGPVRFQYVGSGSGSENLYFQGVRSSSDAHKSEVAHRFKDLGEENFKALVLIAFAQYLQQSPFEDHVKLVNEVTEFAKTCVADESAENCDKSLHTLFGDKLCTVATLRETYGEMADCCAKQEPERNECFLQHKDDNPNLPRLVRPEVDVMCTAFHDNEETFLKKYLYEIARRHPYFYAPELLFFAKRYKAAFTECCQAADKAACLLPKLDELRDEGKASSAKQRLKCASLQKFGERAFKAWAVARLSQRFPKAEFAEVSKLVTDLTKVHTECCHGDLLECADDRADLAKYICENQDSISSKLKECCEKPLLEKSHCIAEVENDEMPADLPSLAADFVESKDVCKNYAEAKDVFLGMFLYEYARRHPDYSVVLLLRLAKTYETTLEKCCAAADPHECYAKVFDEFKPLVEEPQNLIKQNCELFEQLGEYKFQNALLVRYTKKVPQVSTPTLVEVSRNLGKVGSKCCKHPEAKRMPCAEDYLSVVLNQLCVLHEKTPVSDRVTKCCTESLVNRRPCFSALEVDETYVPKEFNAETFTFHADICTLSEKERQIKKQTALVELVKHKPKATKEQLKAVMDDFAAFVEKCCKADDKETCFAEEGKKLVAASQAALGLGGGSHHHHHHLNDIFEAQKIEWHE

SEQ ID NO: 580 - protein, 101 aa, Artificial Sequence
  Description of Artificial Sequence: Synthetic polypeptide
NTTTTTKSEDGHYARTDYAENANKLEESAREHHIPCPEHYNGFCMHGKCEHSINMQEPSCRCDAGYTGQHCEKKDYSVLYVVPGPVRFQYVGGGSHHHHHH

SEQ ID NO: 581 - protein, 333 aa, Artificial Sequence
  Description of Artificial Sequence: Synthetic polypeptide
NTTTTTKSEDGHYARTDYAENANKLEESAREHHIPCPEHYNGFCMHGKCEHSINMQEPSCRCDAGYTGQHCEKKDYSVLYVVPGPVRFQYVGGGSPRNCGGDCKPCICTGSEVSSVFIFPPKPKDVLTITLTPKVTCVVVDISQDDPEVHFSWFVDDVEVHTAQTRPPEEQFNSTFRSVSELPILHQDWLNGRTFRCKVTSAAFPSPIEKTISKPEGRTQVPHVYTMSPTKEEMTQNEVSITCMVKGFYPPDIYVEWQMNGQPQENYKNTPPTMDTDGSYFLYSKLNVKKEKWQQGNTFTCSVLHEGLHNHHTEKSLSHSPGKGGGSHHHHHH

SEQ ID NO: 582 - protein, 5 aa, Artificial Sequence
  Description of Artificial Sequence: Synthetic peptide
SYSMS

SEQ ID NO: 583 - protein, 5 aa, Artificial Sequence
  Description of Artificial Sequence: Synthetic peptide
SYYIS

SEQ ID NO: 584 - protein, 17 aa, Artificial Sequence
  Description of Artificial Sequence: Synthetic peptide
VISGSGGFTDYADSVKG

SEQ ID NO: 585 - protein, 17 aa, Artificial Sequence
  Description of Artificial Sequence: Synthetic peptide
GIIPISGRANYAQKFQG

SEQ ID NO: 586 - protein, 17 aa, Artificial Sequence
  Description of Artificial Sequence: Synthetic peptide
VISGGGSFTSYADSVKG

SEQ ID NO: 587 - protein, 9 aa, Artificial Sequence
  Description of Artificial Sequence: Synthetic peptide
MPLNSPHDY

SEQ ID NO: 588 - protein, 7 aa, Artificial Sequence
  Description of Artificial Sequence: Synthetic peptide
AASSLQS

SEQ ID NO: 589 - protein, 124 aa, Artificial Sequence
  Description of Artificial Sequence: Synthetic polypeptide
QVQLVQSGAEVKKPGSSVKVSCKASGGTFSSYYISWVRQAPGQGLEWMGGIIPISGRANYAQKFQGRVTITADESTSTAYMELSSLRSEDTAVYYCARDGYSSGRSTTYAFDYWGQGTLVTVSS

SEQ ID NO: 590 - DNA, 645 bp, Artificial Sequence
  Description of Artificial Sequence: Synthetic polynucleotide
gaaattgtgctgacccagagcccgggcaccctgagcctgagcccgggcgaacgcgcgaccctgagctgccgcgcgagccagagcgttgccacctattatcttgcgtggtatcagcagaaaccgggccaggcgccgcgcctgctgatttacggtgcatcctcccgtgcgaccggcattccggatcgctttagcggcagcggttccggcaccgattttaccctgaccattagccgcctggaaccggaagattttgcggtgtattattgccagcagtacggctataacccaattacctttggccagggcaccaaagtggaaatcaaacgtacggtggctgcaccatctgtcttcatcttcccgccatctgatgagcagttgaaatctggaactgcctctgttgtgtgcctgctgaataacttctatcccagagaggccaaagtacagtggaaggtggataacgccctccaatcgggtaactcccaggagagtgtcacagagcaggacagcaaggacagcacctacagcctcagcagcaccctgacgctgagcaaagcagactacgagaaacacaaagtctacgcctgcgaagtcacccatcagggcctgagctcgcccgtcacaaagagcttcaacaggggagagtgt

SEQ ID NO: 591 - protein, 96 aa, Artificial Sequence
  Description of Artificial Sequence: Synthetic polypeptide
EIVLTQSPGTLSLSPGERATLSCRASQSVSSSYLAWYQQKPGQAPRLLIYGASSRATGIPDRFSGSGSGTDFTLTISRLEPEDFAVYYCQQYGSSP

SEQ ID NO: 592 - protein, 15 aa, Unknown
  Description of Unknown: TMEFF2 sequence
HGKCEHSINMQEPSC

SEQ ID NO: 593-595 - skipped (3 entries)

SEQ ID NO: 596 - protein, 6 aa, Artificial Sequence
  Description of Artificial Sequence: Synthetic 6xHis tag
HHHHHH

SEQ ID NO: 597-599 - skipped (3 entries)

SEQ ID NO: 600 - protein, 17 aa, Unknown
  Description of Unknown: TMEFF2 sequence
DAGYTGQHCEKKDYSVL

SEQ ID NO: 601 - protein, 330 aa, Homo sapiens [sequence omitted]

SEQ ID NO: 602 - protein, 327 aa, Homo sapiens
ASTKGPSVFPLAPCSRSTSESTAALGCLVKDYFPEPVTVSWNSGALTSGVHTFPAVLQSSGLYSLSSVVTVPSSSLGTKTYTCNVDHKPSNTKVDKRVESKYGPPCPSCPAPEFLGGPSVFLFPPKPKDTLMISRTPEVTCVVVDVSQEDPEVQFNWYVDGVEVHNAKTKPREEQFNSTYRVVSVLTVLHQDWLNGKEYKCKVSNKGLPSSIEKTISKAKGQPREPQVYTLPPSQEEMTKNQVSLTCLVKGFYPSDIAVEWESNGQPENNYKTTPPVLDSDGSFFLYSRLTVDKSRWQEGNVFSCSVMHEALHNHYTQKSLSLSLGK

SEQ ID NO: 603 - protein, 9 aa, Artificial Sequence
  Description of Artificial Sequence: Synthetic peptide
LQDYNYPLT

SEQ ID NO: 604 - protein, 118 aa, Artificial Sequence
  Description of Artificial Sequence: Synthetic polypeptide
EVQLLESGGGLVQPGGSLRLSCAASGFTFSSYSMSWVRQAPGKGLEWVSVISGSGGFTDYADSVKGRFTISRDNSKNTLYLQMNSLRAEDTAVYYCARMPLNSPHDYWGQGTLVTVSS

SEQ ID NO: 605-606 - skipped (2 entries)

SEQ ID NO: 607 - protein, 107 aa, Artificial Sequence
  Description of Artificial Sequence: Synthetic polypeptide
DIQMTQSPSSLSASVGDRVTITCRASQGIRNDLGWYQQKPGKAPKLLIYAASSLQSGVPSRFSGSGSGTDFTLTISSLQPEDFATYYCLQDYNYPLTFGGGTKVEIK

SEQ ID NO: 608-611 - skipped (4 entries)

SEQ ID NO: 612 - protein, 118 aa, Artificial Sequence
  Description of Artificial Sequence: Synthetic polypeptide
EVQLLESGGGLVQPGGSLRLSCAASGFTFSSYSMSWVRQAPGKGLEWVSVISGSGGFTDYADSVKGRFTISRDNSKNTLYLHMNSLRAEDTAVYYCARMPLNSPHDYWGQGTLVTVSS

SEQ ID NO: 613 - protein, 107 aa, Artificial Sequence
  Description of Artificial Sequence: Synthetic polypeptide
AIQMTQSPSSLSASVGDRVTITCRASQGIRNDLGWYQQKPGKAPKLLIYAASSLQSGVPSRFSGSGSGTDFTLTISSLQPEDFATYYCLQDYNYPLTFGGGTKVEIK

SEQ ID NO: 614 - protein, 445 aa, Artificial Sequence
  Description of Artificial Sequence: Synthetic polypeptide
EVQLLESGGGLVQPGGSLRLSCAASGFTFSSYSMSWVRQAPGKGLEWVSVISGSGGFTDYADSVKGRFTISRDNSKNTLYLQMNSLRAEDTAVYYCARMPLNSPHDYWGQGTLVTVSSASTKGPSVFPLAPCSRSTSESTAALGCLVKDYFPEPVTVSWNSGALTSGVHTFPAVLQSSGLYSLSSVVTVPSSSLGTKTYTCNVDHKPSNTKVDKRVESKYGPPCPPCPAPEAAGGPSVFLFPPKPKDTLMISRTPEVTCVVVDVSQEDPEVQFNWYVDGVEVHNAKTKPREEQFNSTYRVVSVLTVLHQDWLNGKEYKCKVSNKGLPSSIEKTISKAKGQPREPQVYTLPPSQEEMTKNQVSLTCLVKGFYPSDIAVEWESNGQPENNYKTTPPVLDSDGSFFLYSRLTVDKSRWQEGNVFSCSVMHEALHNHYTQKSLSLSLGK

SEQ ID NO: 615 - protein, 214 aa, Artificial Sequence
  Description of Artificial Sequence: Synthetic polypeptide
DIQMTQSPSSLSASVGDRVTITCRASQGIRNDLGWYQQKPGKAPKLLIYAASSLQSGVPSRFSGSGSGTDFTLTISSLQPEDFATYYCLQDYNYPLTFGGGTKVEIKRTVAAPSVFIFPPSDEQLKSGTASVVCLLNNFYPREAKVQWKVDNALQSGNSQESVTEQDSKDSTYSLSSTLTLSKADYEKHKVYACEVTHQGLSSPVTKSFNRGEC

SEQ ID NO: 616 - protein, 445 aa, Artificial Sequence
  Description of Artificial Sequence: Synthetic polypeptide
EVQLLESGGGLVQPGGSLRLSCAASGFTFSSYSMSWVRQAPGKGLEWVSVISGSGGFTDYADSVKGRFTISRDNSKNTLYLHMNSLRAEDTAVYYCARMPLNSPHDYWGQGTLVTVSSASTKGPSVFPLAPCSRSTSESTAALGCLVKDYFPEPVTVSWNSGALTSGVHTFPAVLQSSGLYSLSSVVTVPSSSLGTKTYTCNVDHKPSNTKVDKRVESKYGPPCPPCPAPEAAGGPSVFLFPPKPKDTLMISRTPEVTCVVVDVSQEDPEVQFNWYVDGVEVHNAKTKPREEQFNSTYRVVSVLTVLHQDWLNGKEYKCKVSNKGLPSSIEKTISKAKGQPREPQVYTLPPSQEEMTKNQVSLTCLVKGFYPSDIAVEWESNGQPENNYKTTPPVLDSDGSFFLYSRLTVDKSRWQEGNVFSCSVMHEALHNHYTQKSLSLSLGK

SEQ ID NO: 617 - protein, 214 aa, Artificial Sequence
  Description of Artificial Sequence: Synthetic polypeptide
AIQMTQSPSSLSASVGDRVTITCRASQGIRNDLGWYQQKPGKAPKLLIYAASSLQSGVPSRFSGSGSGTDFTLTISSLQPEDFATYYCLQDYNYPLTFGGGTKVEIKRTVAAPSVFIFPPSDEQLKSGTASVVCLLNNFYPREAKVQWKVDNALQSGNSQESVTEQDSKDSTYSLSSTLTLSKADYEKHKVYACEVTHQGLSSPVTKSFNRGEC

SEQ ID NO: 618 - DNA, 354 bp, Artificial Sequence
  Description of Artificial Sequence: Synthetic polynucleotide
gaggtgcagctgctggaaagcggcggaggcctggtgcagcccggaggaagcctgagactcagctgtgccgccagcggcttcaccttcagcagctacagcatgagctgggtcaggcaggcccctggcaaaggactggagtgggtgagcgtgattagcggcagcggcggcttcaccgattacgccgacagcgtgaagggcaggttcaccatcagcagggacaatagcaagaacaccctgtacctgcagatgaacagcctgagggccgaggacaccgccgtgtactactgcgccaggatgcccctgaacagccctcacgactactggggccagggaaccctggtgaccgtgtccagc

SEQ ID NO: 619 - DNA, 321 bp, Artificial Sequence
  Description of Artificial Sequence: Synthetic polynucleotide
gacatccagatgacccagagccctagcagcctgagcgctagcgtgggcgacagggtgaccatcacctgcagggccagccagggcatcagaaacgacctgggctggtaccagcagaagcccggcaaggcccccaagctgctgatctacgccgccagcagcctgcagagcggagtgcctagcaggttcagcggaagcggcagcggcaccgacttcaccctgaccatcagcagcctgcagcccgaggacttcgccacctactactgcctgcaggactacaactaccccctgacattcggcggcggcaccaaggtggagatcaag

SEQ ID NO: 620 - DNA, 1335 bp, Artificial Sequence
  Description of Artificial Sequence: Synthetic polynucleotide
gaggtgcagctgctggaaagcggcggaggcctggtgcagcccggaggaagcctgagactcagctgtgccgccagcggcttcaccttcagcagctacagcatgagctgggtcaggcaggcccctggcaaaggactggagtgggtgagcgtgattagcggcagcggcggcttcaccgattacgccgacagcgtgaagggcaggttcaccatcagcagggacaatagcaagaacaccctgtacctgcagatgaacagcctgagggccgaggacaccgccgtgtactactgcgccaggatgcccctgaacagccctcacgactactggggccagggaaccctggtgaccgtgtccagcgcttccaccaagggcccatccgtcttccccctggcgccctgctccaggagcacctccgagagcacagccgccctgggctgcctggtcaaggactacttccccgaaccggtgacggtgtcgtggaactcaggcgccctgaccagcggcgtgcacaccttcccggctgtcctacagtcctcaggactctactccctcagcagcgtggtgaccgtgccctccagcagcttgggcacgaaaacctacacttgcaacgtagatcacaagcccagcaacaccaaggtggacaagagagttgagtccaaatatggtcccccatgcccaccatgcccagcacctgaggccgccgggggaccatcagtcttcctgttccccccaaaacccaaggacactctcatgatctcccggacccctgaggtcacgtgcgtggtggtggacgtgagccaggaagaccccgaggtccagttcaactggtacgtggatggcgtggaggtgcataatgccaagacaaagccgcgggaggagcagttcaacagcacgtaccgtgtggtcagcgtcctcaccgtcctgcaccaggactggctgaacggcaaggagtacaagtgcaaggtctccaacaaaggcctcccgtcctccatcgagaaaaccatctccaaagccaaagggcagccccgagagccacaggtgtacaccctgcccccatcccaggaggagatgaccaagaaccaggtcagcctgacctgcctggtcaaaggcttctaccccagcgacatcgccgtggagtgggagagcaatgggcagccggagaacaactacaagaccacgcctcccgtgctggactccgacggctccttcttcctctacagcaggctaaccgtggacaagagcagatggcaggaggggaatgtcttctcatgctccgtgatgcatgaggctctgcacaaccactacacacagaagagcctctccctgtctctgggtaaa

SEQ ID NO: 621 - DNA, 645 bp, Artificial Sequence
  Description of Artificial Sequence: Synthetic polynucleotide
gacatccagatgacccagagccctagcagcctgagcgctagcgtgggcgacagggtgaccatcacctgcagggccagccagggcatcagaaacgacctgggctggtaccagcagaagcccggcaaggcccccaagctgctgatctacgccgccagcagcctgcagagcggagtgcctagcaggttcagcggaagcggcagcggcaccgacttcaccctgaccatcagcagcctgcagcccgaggacttcgccacctactactgcctgcaggactacaactaccccctgacattcggcggcggcaccaaggtggagatcaagcgtacggtggctgcaccatctgtcttcatcttcccgccatctgatgagcagttgaaatctggaactgcctctgttgtgtgcctgctgaataacttctatcccagagaggccaaagtacagtggaaggtggataacgccctccaatcgggtaactcccaggagagtgtcacagagcaggacagcaaggacagcacctacagcctcagcagcaccctgacgctgagcaaagcagactacgagaaacacaaagtctacgcctgcgaagtcacccatcagggcctgagctcgcccgtcacaaagagcttcaacaggggagagtgttag

SEQ ID NO: 622 - DNA, 354 bp, Artificial Sequence
  Description of Artificial Sequence: Synthetic polynucleotide
gaggtgcagctgctggaaagcggcggaggcctggtgcagcccggaggaagcctgagactcagctgtgccgccagcggcttcaccttcagcagctacagcatgagctgggtcaggcaggcccctggcaaaggactggagtgggtgagcgtgattagcggcagcggcggcttcaccgattacgccgacagcgtgaagggcaggttcaccatcagcagggacaatagcaagaacaccctgtacctgcacatgaacagcctgagggccgaggacaccgccgtgtactactgcgccaggatgcccctgaacagccctcacgactactggggccagggaaccctggtgaccgtgtccagc

SEQ ID NO: 623 - DNA, 321 bp, Artificial Sequence
  Description of Artificial Sequence: Synthetic polynucleotide
gccatccagatgacccagagccctagcagcctgagcgctagcgtgggcgacagggtgaccatcacctgcagggccagccagggcatcagaaacgacctgggctggtaccagcagaagcccggcaaggcccccaagctgctgatctacgccgccagcagcctgcagagcggagtgcctagcaggttcagcggaagcggcagcggcaccgacttcaccctgaccatcagcagcctgcagcccgaggacttcgccacctactactgcctgcaggactacaactaccccctgacattcggcggcggcaccaaggtggagatcaag

SEQ ID NO: 624 - DNA, 1335 bp, Artificial Sequence
  Description of Artificial Sequence: Synthetic polynucleotide
gaggtgcagctgctggaaagcggcggaggcctggtgcagcccggaggaagcctgagactcagctgtgccgccagcggcttcaccttcagcagctacagcatgagctgggtcaggcaggcccctggcaaaggactggagtgggtgagcgtgattagcggcagcggcggcttcaccgattacgccgacagcgtgaagggcaggttcaccatcagcagggacaatagcaagaacaccctgtacctgcacatgaacagcctgagggccgaggacaccgccgtgtactactgcgccaggatgcccctgaacagccctcacgactactggggccagggaaccctggtgaccgtgtccagcgcttccaccaagggcccatccgtcttccccctggcgccctgctccaggagcacctccgagagcacagccgccctgggctgcctggtcaaggactacttccccgaaccggtgacggtgtcgtggaactcaggcgccctgaccagcggcgtgcacaccttcccggctgtcctacagtcctcaggactctactccctcagcagcgtggtgaccgtgccctccagcagcttgggcacgaaaacctacacttgcaacgtagatcacaagcccagcaacaccaaggtggacaagagagttgagtccaaatatggtcccccatgcccaccatgcccagcacctgaggccgccgggggaccatcagtcttcctgttccccccaaaacccaaggacactctcatgatctcccggacccctgaggtcacgtgcgtggtggtggacgtgagccaggaagaccccgaggtccagttcaactggtacgtggatggcgtggaggtgcataatgccaagacaaagccgcgggaggagcagttcaacagcacgtaccgtgtggtcagcgtcctcaccgtcctgcaccaggactggctgaacggcaaggagtacaagtgcaaggtctccaacaaaggcctcccgtcctccatcgagaaaaccatctccaaagccaaagggcagccccgagagccacaggtgtacaccctgcccccatcccaggaggagatgaccaagaaccaggtcagcctgacctgcctggtcaaaggcttctaccccagcgacatcgccgtggagtgggagagcaatgggcagccggagaacaactacaagaccacgcctcccgtgctggactccgacggctccttcttcctctacagcaggctaaccgtggacaagagcagatggcaggaggggaatgtcttctcatgctccgtgatgcatgaggctctgcacaaccactacacacagaagagcctctccctgtctctgggtaaa

SEQ ID NO: 625 - DNA, 645 bp, Artificial Sequence
  Description of Artificial Sequence: Synthetic polynucleotide
gccatccagatgacccagagccctagcagcctgagcgctagcgtgggcgacagggtgaccatcacctgcagggccagccagggcatcagaaacgacctgggctggtaccagcagaagcccggcaaggcccccaagctgctgatctacgccgccagcagcctgcagagcggagtgcctagcaggttcagcggaagcggcagcggcaccgacttcaccctgaccatcagcagcctgcagcccgaggacttcgccacctactactgcctgcaggactacaactaccccctgacattcggcggcggcaccaaggtggagatcaagcgtacggtggctgcaccatctgtcttcatcttcccgccatctgatgagcagttgaaatctggaactgcctctgttgtgtgcctgctgaataacttctatcccagagaggccaaagtacagtggaaggtggataacgccctccaatcgggtaactcccaggagagtgtcacagagcaggacagcaaggacagcacctacagcctcagcagcaccctgacgctgagcaaagcagactacgagaaacacaaagtctacgcctgcgaagtcacccatcagggcctgagctcgcccgtcacaaagagcttcaacaggggagagtgttag

SEQ ID NO: 626 - protein, 330 aa, Artificial Sequence
  Description of Artificial Sequence: Synthetic polypeptide
ASTKGPSVFPLAPSSKSTSGGTAALGCLVKDYFPEPVTVSWNSGALTSGVHTFPAVLQSSGLYSLSSVVTVPSSSLGTQTYICNVNHKPSNTKVDKKVEPKSCDKTHTCPPCPAPELLGGPSVFLFPPKPKDTLMISRTPEVTCVVVDVSHEDPEVKFNWYVDGVEVHNAKTKPREEQYNSTYRVVSVLTVLHQDWLNGKEYKCKVSNKALPAPIEKTISKAKGQPREPQVYTLPPSRDELTKNQVSLTCLVKGFYPSDIAVEWESNGQPENNYKTTPPVLDSDGSFLLYSKLTVDKSRWQQGNVFSCSVMHEALHNHYTQKSLSLSPGK

SEQ ID NO: 627 - protein, 327 aa, Artificial Sequence
  Description of Artificial Sequence: Synthetic polypeptide
ASTKGPSVFPLAPCSRSTSESTAALGCLVKDYFPEPVTVSWNSGALTSGVHTFPAVLQSSGLYSLSSVVTVPSSSLGTKTYTCNVDHKPSNTKVDKRVESKYGPPCPSCPAPEFLGGPSVFLFPPKPKDTLMISRTPEVTCVVVDVSQEDPEVQFNWYVDGVEVHNAKTKPREEQFNSTYRVVSVLTVLHQDWLNGKEYKCKVSNKGLPSSIEKTISKAKGQPREPQVYTLPPSQEEMTKNQVSLTCLVKGFYPSDIAVEWESNGQPENNYKTTPPVLDSDGSFLLYSKLTVDKSRWQEGNVFSCSVMHEALHNHYTQKSLSLSLGK

SEQ ID NO: 628 - protein, 330 aa, Artificial Sequence
  Description of Artificial Sequence: Synthetic polypeptide
ASTKGPSVFPLAPSSKSTSGGTAALGCLVKDYFPEPVTVSWNSGALTSGVHTFPAVLQSSGLYSLSSVVTVPSSSLGTQTYICNVNHKPSNTKVDKKVEPKSCDKTHTCPPCPAPELLGGPSVFLFPPKPKDTLMISRTPEVTCVVVDVSHEDPEVKFNWYVDGVEVHNAKTKPREEQYNSTYRVVSVLTVLHQDWLNGKEYKCKVSNKALPAPIEKTISKAKGQPREPQVYTLPPSRDELTKNQVSLTCLVKGFYPSDIAVEWESNGQPENNYKTTPPVLDSDGSFFLYSRLTVDKSRWQQGNVFSCSVMHEALHNHYTQKSLSLSPGK

SEQ ID NO: 629 - protein, 91 aa, Unknown
  Description of Unknown: TMEFF2 sequence
NTTTTTKSEDGHYARTDYAENANKLEESAREHHIPCPEHYNGFCMHGKCEHSINMQEPSCRCDAGYTGQHCEKKDYSVLYVVPGPVRFQYV

SEQ ID NO: 630 - protein, 11 aa, Artificial Sequence
  Description of Artificial Sequence: Synthetic peptide
RASQSVSSYLA

SEQ ID NO: 631 - protein, 214 aa, Artificial Sequence
  Description of Artificial Sequence: Synthetic polypeptide
EIVLTQSPATLSLSPGERATLSCRASQSVSSYLAWYQQKPGQAPRLLIYDASYRATGIPARFSGSGSGTDFTLTISSLEPEDFAVYYCQQRRNWPLTFGQGTKVEIKRTVAAPSVFIFPPSDEQLKSGTASVVCLLNNFYPREAKVQWKVDNALQSGNSQESVTEQDSKDSTYSLSSTLTLSKADYEKHKVYACEVTHQGLSSPVTKSFNRGEC

SEQ ID NO: 632 - protein, 15 aa, Artificial Sequence
  Description of Artificial Sequence: Synthetic peptide
DSYDSSLYVGDYFDY

SEQ ID NO: 633 - protein, 447 aa, Artificial Sequence
  Description of Artificial Sequence: Synthetic polypeptide
QLQLQESGPGLVKPSETLSLTCTVSGVSISSSTYYWGWLRQPPGMGLEWTGSIYFTGNTYYNPSLKSRVTISVDTSRNQFSLKLSSVTAADTAVYYCGSLFGDYGYFDYWGQGTLVTVSSASTKGPSVFPLAPCSRSTSESTAALGCLVKDYFPEPVTVSWNSGALTSGVHTFPAVLQSSGLYSLSSVVTVPSSSLGTKTYTCNVDHKPSNTKVDKRVESKYGPPCPPCPAPEAAGGPSVFLFPPKPKDTLMISRTPEVTCVVVDVSQEDPEVQFNWYVDGVEVHNAKTKPREEQFNSTYRVVSVLTVLHQDWLNGKEYKCKVSNKGLPSSIEKTISKAKGQPREPQVYTLPPSQEEMTKNQVSLTCLVKGFYPSDIAVEWESNGQPENNYKTTPPVLDSDGSFFLYSRLTVDKSRWQEGNVFSCSVMHEALHNHYTQKSLSLSLGK

SEQ ID NO: 634 - protein, 9 aa, Artificial Sequence
  Description of Artificial Sequence: Synthetic peptide
QAWDSSTVV

SEQ ID NO: 635 - protein, 207 aa, Homo sapiens
MQSGTHWRVLGLCLLSVGVWGQDGNEEMGGITQTPYKVSISGTTVILTCPQYPGSEILWQHNDKNIGGDEDDKNIGSDEDHLSLKEFSELEQSGYYVCYPRGSKPEDANFYLYLRARVCENCMEMDVMSVATIVIVDICITGGLLLLVYYWSKNRKAKAKPVTRGAGAGGRQRGQNKERPPPVPNPDYEPIRKGQRDLYSGLNQRRI

SEQ ID NO: 636 - protein, 104 aa, Homo sapiens
DGNEEMGGITQTPYKVSISGTTVILTCPQYPGSEILWQHNDKNIGGDEDDKNIGSDEDHLSLKEFSELEQSGYYVCYPRGSKPEDANFYLYLRARVCENCMEMD

SEQ ID NO: 637 - protein, 450 aa, Artificial Sequence
  Description of Artificial Sequence: Synthetic polypeptide
QVQLQQSGPGLVKPSQTLSLTCAISGDSVFNNNAAWTWIRQSPSRGLEWLGRTYYRSKWLYDYAVSVKSRITVNPDTSRNQFTLQLKSVTPEDTALYYCSRGYSSSFDYWGQGTLVTVSSASTKGPSVFPLAPSSKSTSGGTAALGCLVKDYFPEPVTVSWNSGALTSGVHTFPAVLQSSGLYSLSSVVTVPSSSLGTQTYICNVNHKPSNTKVDKKVEPKSCDKTHTCPPCPAPELLGGPSVFLFPPKPKDTLMISRTPEVTCVVVDVSHEDPEVKFNWYVDGVEVHNAKTKPREEQYNSTYRVVSVLTVLHQDWLNGKEYKCKVSNKALPAPIEKTISKAKGQPREPQVYTLPPSREEMTKNQVSLTCLVKGFYPSDIAVEWESNGQPENNYKTTPPVLDSDGSFFLYSKLTVDKSRWQQGNVFSCSVMHEALHNHYTQKSLSLSPGK

SEQ ID NO: 638 - protein, 450 aa, Artificial Sequence
  Description of Artificial Sequence: Synthetic polypeptide
QVQLQQSGPGLVKPSQTLSLTCAISGDSVFNNNGAWSWIRQSPSRGLEWLGRTYYRSKWLYDYAVSVKSRITVNPDTSRNQFTLQLNSVTPEDTALYYCARGYSSSFDYWGQGTLVTVSSASTKGPSVFPLAPSSKSTSGGTAALGCLVKDYFPEPVTVSWNSGALTSGVHTFPAVLQSSGLYSLSSVVTVPSSSLGTQTYICNVNHKPSNTKVDKKVEPKSCDKTHTCPPCPAPELLGGPSVFLFPPKPKDTLMISRTPEVTCVVVDVSHEDPEVKFNWYVDGVEVHNAKTKPREEQYNSTYRVVSVLTVLHQDWLNGKEYKCKVSNKALPAPIEKTISKAKGQPREPQVYTLPPSREEMTKNQVSLTCLVKGFYPSDIAVEWESNGQPENNYKTTPPVLDSDGSFFLYSKLTVDKSRWQQGNVFSCSVMHEALHNHYTQKSLSLSPGK

SEQ ID NO: 639 - protein, 450 aa, Artificial Sequence
  Description of Artificial Sequence: Synthetic polypeptide
QVRLQQSGPGLVKPSQTLSLTCAISGDSVFNNNAAWSWIRQSPSRGLEWLGRTYYRSKWLYDYAVTVKSRITVNPDTSRNQFTLQLTSVTPEDTALYYCARGYSSSFDYWGQGTLVTVSSASTKGPSVFPLAPSSKSTSGGTAALGCLVKDYFPEPVTVSWNSGALTSGVHTFPAVLQSSGLYSLSSVVTVPSSSLGTQTYICNVNHKPSNTKVDKKVEPKSCDKTHTCPPCPAPELLGGPSVFLFPPKPKDTLMISRTPEVTCVVVDVSHEDPEVKFNWYVDGVEVHNAKTKPREEQYNSTYRVVSVLTVLHQDWLNGKEYKCKVSNKALPAPIEKTISKAKGQPREPQVYTLPPSREEMTKNQVSLTCLVKGFYPSDIAVEWESNGQPENNYKTTPPVLDSDGSFFLYSKLTVDKSRWQQGNVFSCSVMHEALHNHYTQKSLSLSPGK

SEQ ID NO: 640 - protein, 447 aa, Artificial Sequence
  Description of Artificial Sequence: Synthetic polypeptide
QVQLQQSGPRLVRPSQTLSLTCAISGDSVFNNNAAWSWIRQSPSRGLEWLGRTYYRSKWLYDYAVSVKSRITVNPDTSRNQFTLQLNSVTPEDTALYYCARGYSSSFDYWGQGTLVTVSSASTKGPSVFPLAPCSRSTSESTAALGCLVKDYFPEPVTVSWNSGALTSGVHTFPAVLQSSGLYSLSSVVTVPSSSLGTKTYTCNVDHKPSNTKVDKRVESKYGPPCPPCPAPEAAGGPSVFLFPPKPKDTLMISRTPEVTCVVVDVSQEDPEVQFNWYVDGVEVHNAKTKPREEQFNSTYRVVSVLTVLHQDWLNGKEYKCKVSNKGLPSSIEKTISKAKGQPREPQVYTLPPSQEEMTKNQVSLTCLVKGFYPSDIAVEWESNGQPENNYKTTPPVLDSDGSFLLYSKLTVDKSRWQEGNVFSCSVMHEALHNHYTQKSLSLSLGK

SEQ ID NO: 641 - protein, 450 aa, Artificial Sequence
  Description of Artificial Sequence: Synthetic polypeptide
QVQLQQSGPGLVKPSQTLSLTCAISGDSVFNNNAAWSWIRQSPSRGLEWLGRTYYRSKWLYDYAVSVKSRITVNPDTSRNQFTLQLKSVTPEDTALYYCSRGYSSSFDYWGQGTLVTVSSASTKGPSVFPLAPSSKSTSGGTAALGCLVKDYFPEPVTVSWNSGALTSGVHTFPAVLQSSGLYSLSSVVTVPSSSLGTQTYICNVNHKPSNTKVDKKVEPKSCDKTHTCPPCPAPELLGGPSVFLFPPKPKDTLMISRTPEVTCVVVDVSHEDPEVKFNWYVDGVEVHNAKTKPREEQYNSTYRVVSVLTVLHQDWLNGKEYKCKVSNKALPAPIEKTISKAKGQPREPQVYTLPPSREEMTKNQVSLTCLVKGFYPSDIAVEWESNGQPENNYKTTPPVLDSDGSFFLYSKLTVDKSRWQQGNVFSCSVMHEALHNHYTQKSLSLSPGK

SEQ ID NO: 642 - protein, 450 aa, Artificial Sequence
  Description of Artificial Sequence: Synthetic polypeptide
QVQLQQSGPGLVKPSQTLSLTCAISGDSVFNNNAAWSWIRQSPSRGLEWLGRTYYRSKWLYDYAVSVKSRITVNPDTSRNQFTLQLNSVTPEDTALYYCVRGYSSSFDYWGQGTLVTVSSASTKGPSVFPLAPSSKSTSGGTAALGCLVKDYFPEPVTVSWNSGALTSGVHTFPAVLQSSGLYSLSSVVTVPSSSLGTQTYICNVNHKPSNTKVDKKVEPKSCDKTHTCPPCPAPELLGGPSVFLFPPKPKDTLMISRTPEVTCVVVDVSHEDPEVKFNWYVDGVEVHNAKTKPREEQYNSTYRVVSVLTVLHQDWLNGKEYKCKVSNKALPAPIEKTISKAKGQPREPQVYTLPPSREEMTKNQVSLTCLVKGFYPSDIAVEWESNGQPENNYKTTPPVLDSDGSFFLYSKLTVDKSRWQQGNVFSCSVMHEALHNHYTQKSLSLSPGK

SEQ ID NO: 643 - protein, 450 aa, Artificial Sequence
  Description of Artificial Sequence: Synthetic polypeptide
QVQLQQSGPRLVRPSQTLSLTCAISGDSVFNNNAAWSWIRQSPSRGLEWLGRTYYRSKWLYDYAVSVKSRITVNPDTSRNQFTLQLNSVTPEDTALYYCARGYSSSFDYWGQGTLVTVSSASTKGPSVFPLAPSSKSTSGGTAALGCLVKDYFPEPVTVSWNSGALTSGVHTFPAVLQSSGLYSLSSVVTVPSSSLGTQTYICNVNHKPSNTKVDKKVEPKSCDKTHTCPPCPAPELLGGPSVFLFPPKPKDTLMISRTPEVTCVVVDVSHEDPEVKFNWYVDGVEVHNAKTKPREEQYNSTYRVVSVLTVLHQDWLNGKEYKCKVSNKALPAPIEKTISKAKGQPREPQVYTLPPSREEMTKNQVSLTCLVKGFYPSDIAVEWESNGQPENNYKTTPPVLDSDGSFFLYSKLTVDKSRWQQGNVFSCSVMHEALHNHYTQKSLSLSPGK

SEQ ID NO: 644 - protein, 450 aa, Artificial Sequence; identical to SEQ ID NO: 642
  Description of Artificial Sequence: Synthetic polypeptide

SEQ ID NO: 645 - protein, 216 aa, Artificial Sequence
  Description of Artificial Sequence: Synthetic polypeptide
QSALTQPASVSGSPGQSITISCTGTSSNIGTYKFVSWYQQHPDKAPKVLLYEVSKRPSGVSSRFSGSKSGNTASLTISGLQAEDQADYHCCSYAGSGTLLFGGGTKLTVLGQPKAAPSVTLFPPSSEELQANKATLVCLISDFYPGAVTVAWKADSSPVKAGVETTTPSKQSNNKYAASSYLSLTPEQWKSHRSYSCQVTHEGSTVEKTVAPTECS

SEQ ID NO: 646 - protein, 216 aa, Artificial Sequence; identical to SEQ ID NO: 645
  Description of Artificial Sequence: Synthetic polypeptide

SEQ ID NO: 647 - protein, 216 aa, Artificial Sequence
  Description of Artificial Sequence: Synthetic polypeptide
QSALTQPASVSGSPGQSITISCTGTSRDIGTYKFVSWYQQHPDKAPKVLLYEVSKRPSGVSSRFSGSKSGNTASLTISGLQAEDQADYHCCSYAGSGTLLFGGGTKLTVLGQPKAAPSVTLFPPSSEELQANKATLVCLISDFYPGAVTVAWKADSSPVKAGVETTTPSKQSNNKYAASSYLSLTPEQWKSHRSYSCQVTHEGSTVEKTVAPTECS

SEQ ID NO: 648 - protein, 216 aa, Artificial Sequence
  Description of Artificial Sequence: Synthetic polypeptide
QSALTQPASVSGSPGQSITISCTGTSRDIGTYKFVSWYQQHPDKAPKVLLYEVNKRPSGVSSRFSGSKSGNTASLTISGLQAEDQADYHCCSYAGSGTLLFGGGTKLTVLGQPKAAPSVTLFPPSSEELQANKATLVCLISDFYPGAVTVAWKADSSPVKAGVETTTPSKQSNNKYAASSYLSLTPEQWKSHRSYSCQVTHEGSTVEKTVAPTECS

SEQ ID NO: 649 - protein, 216 aa, Artificial Sequence; identical to SEQ ID NO: 645
  Description of Artificial Sequence: Synthetic polypeptide

SEQ ID NO: 650 - protein, 216 aa, Artificial Sequence
  Description of Artificial Sequence: Synthetic polypeptide
QSALTQPASVSGSPGQSITISCTGTSSDIGTYKFVSWYQQHPDKAPKVLLYEVSKRPSGVSSRFSGSKSDNTASLTISGLQAEDQADYHCCSYAGSGTLLFGGGTKLTVLGQPKAAPSVTLFPPSSEELQANKATLVCLISDFYPGAVTVAWKADSSPVKAGVETTTPSKQSNNKYAASSYLSLTPEQWKSHRSYSCQVTHEGSTVEKTVAPTECS

SEQ ID NO: 651 - protein, 120 aa, Artificial Sequence
  Description of Artificial Sequence: Synthetic polypeptide
QVQLQQSGPGLVKPSQTLSLTCAISGDSVFNNNAAWSWIRQSPSRGLEWLGRTYYRSKWLYDYAVSVKSRITVNPDTSRNQFTLQLNSVTPEDTALYYCVRGYSSSFDYWGQGTLVTVSS

SEQ ID NO: 652 - protein, 120 aa, Artificial Sequence; identical to SEQ ID NO: 20
  Description of Artificial Sequence: Synthetic polypeptide

SEQ ID NO: 653 - protein, 120 aa, Artificial Sequence
  Description of Artificial Sequence: Synthetic polypeptide
QVQLQQSGPGLVKPSQTLSLTCAISGDSVFNNNAAWSWIRQSPSRGLEWLGRTYYRSKWLYDYAVSVKSRITVNPDTSRNQFTLQLKSVTPEDTALYYCSRGYSSSFDYWGQGTLVTVSS

SEQ ID NO: 654 - protein, 120 aa, Artificial Sequence
  Description of Artificial Sequence: Synthetic polypeptide
QVQLQQSGPGLVKPSQTLSLTCAISGDSVFNNNGAWSWIRQSPSRGLEWLGRTYYRSKWLYDYAVSVKSRITVNPDTSRNQFTLQLNSVTPEDTALYYCARGYSSSFDYWGQGTLVTVSS

SEQ ID NO: 655 - protein, 120 aa, Artificial Sequence
  Description of Artificial Sequence: Synthetic polypeptide
QVRLQQSGPGLVKPSQTLSLTCAISGDSVFNNNAAWSWIRQSPSRGLEWLGRTYYRSKWLYDYAVTVKSRITVNPDTSRNQFTLQLTSVTPEDTALYYCARGYSSSFDYWGQGTLVTVSS

SEQ ID NO: 656 - protein, 120 aa, Artificial Sequence
  Description of Artificial Sequence: Synthetic polypeptide
QVQLQQSGPGLVKPSQTLSLTCAISGDSVFNNNAAWTWIRQSPSRGLEWLGRTYYRSKWLYDYAVSVKSRITVNPDTSRNQFTLQLKSVTPEDTALYYCSRGYSSSFDYWGQGTLVTVSS

SEQ ID NO: 657 - protein, 120 aa, Artificial Sequence
  Description of Artificial Sequence: Synthetic polypeptide
QVQLQQSGPGLVKPSQTLSLTCAISGDSVFNNNAAWSWIRQSPSRGLEWLGRTYYRSKWLYDYAVSVKSRITINPDTSKNQFSLQLNSVTPEDTAVYYCARGYSSSFDYWGQGTLVTVSS

SEQ ID NO: 658 - protein, 110 aa, Artificial Sequence
  Description of Artificial Sequence: Synthetic polypeptide
QSALTQPASVSGSPGQSITISCTGTSRDIGTYKFVSWYQQHPDKAPKVLLYEVNKRPSGVSSRFSGSKSGNTASLTISGLQAEDQADYHCCSYAGSGTLLFGGGTKLTVL

SEQ ID NO: 659 - protein, 110 aa, Artificial Sequence
  Description of Artificial Sequence: Synthetic polypeptide
QSALTQPASVSGSPGQSITISCTGTSSNIGTYKFVSWYQQHPDKAPKVLLYEVSKRPSGVSSRFSGSKSGNTASLTISGLQAEDQADYHCCSYAGSGTLLFGGGTKLTVL

SEQ ID NO: 660 - protein, 110 aa, Artificial Sequence
  Description of Artificial Sequence: Synthetic polypeptide
QSALTQPASVSGSPGQSITISCTGTSSDIGTYKFVSWYQQHPDKAPKVLLYEVSKRPSGVSSRFSGSKSDNTASLTISGLQAEDQADYHCCSYAGSGTLLFGGGTKLTVL

SEQ ID NO: 661 - protein, 110 aa, Artificial Sequence; identical to SEQ ID NO: 52
  Description of Artificial Sequence: Synthetic polypeptide

SEQ ID NO: 662 - protein, 7 aa, Artificial Sequence
  Description of Artificial Sequence: Synthetic peptide
NNNAAWS

SEQ ID NO: 663 - protein, 18 aa, Artificial Sequence
  Description of Artificial Sequence: Synthetic peptide
RTYYRSKWLYDYAVSVKS

SEQ ID NO: 664 - protein, 8 aa, Artificial Sequence
  Description of Artificial Sequence: Synthetic peptide
GYSSSFDY

SEQ ID NO: 665 - protein, 7 aa, Artificial Sequence
  Description of Artificial Sequence: Synthetic peptide
NNNGAWS

SEQ ID NO: 666 - protein, 7 aa, Artificial Sequence
  Description of Artificial Sequence: Synthetic peptide
NNNAAWT

SEQ ID NO: 667 - protein, 14 aa, Artificial Sequence
  Description of Artificial Sequence: Synthetic peptide
TGTSRDIGTYKFVS

SEQ ID NO: 668 - protein, 14 aa, Artificial Sequence
  Description of Artificial Sequence: Synthetic peptide
TGTSSNIGTYKFVS

SEQ ID NO: 669 - protein, 7 aa, Artificial Sequence
  Description of Artificial Sequence: Synthetic peptide
EVNKRPS

SEQ ID NO: 670 - protein, 10 aa, Artificial Sequence
  Description of Artificial Sequence: Synthetic peptide
CSYAGSGTLL

SEQ ID NO: 671 - protein, 14 aa, Artificial Sequence
  Description of Artificial Sequence: Synthetic peptide
TGTSSNIGTYKFVS

SEQ ID NO: 672 - protein, 14 aa, Artificial Sequence
  Description of Artificial Sequence: Synthetic peptide
TGTSRDIGTYKFVS

SEQ ID NO: 673 - protein, 7 aa, Artificial Sequence
  Description of Artificial Sequence: Synthetic peptide
EVSKRPS

SEQ ID NO: 674 - protein, 14 aa, Artificial Sequence
  Description of Artificial Sequence: Synthetic peptide
TGTSSDIGTYKFVS

SEQ ID NO: 675 - protein, 447 aa, Artificial Sequence
  Description of Artificial Sequence: Synthetic polypeptide
QVQLQQSGPGLVKPSQTLSLTCAISGDSVFNNNAAWSWIRQSPSRGLEWLGRTYYRSKWLYDYAVSVKSRITINPDTSKNQFSLQLNSVTPEDTAVYYCARGYSSSFDYWGQGTLVTVSSASTKGPSVFPLAPCSRSTSESTAALGCLVKDYFPEPVTVSWNSGALTSGVHTFPAVLQSSGLYSLSSVVTVPSSSLGTKTYTCNVDHKPSNTKVDKRVESKYGPPCPPCPAPEAAGGPSVFLFPPKPKDTLMISRTPEVTCVVVDVSQEDPEVQFNWYVDGVEVHNAKTKPREEQFNSTYRVVSVLTVLHQDWLNGKEYKCKVSNKGLPSSIEKTISKAKGQPREPQVYTLPPSQEEMTKNQVSLTCLVKGFYPSDIAVEWESNGQPENNYKTTPPVLDSDGSFLLYSKLTVDKSRWQEGNVFSCSVMHEALHNHYTQKSLSLSLGK

SEQ ID NO: 676 - protein, 216 aa, Artificial Sequence
  Description of Artificial Sequence: Synthetic polypeptide
QSALTQPASVSGSPGQSITISCTGTSSNIGTYKFVSWYQQHPDKAPKVLLYEVSKRPSGVSSRFSGSKSGNTASLTISGLQAEDQADYHCVSYAGSGTLLFGGGTKLTVLGQPKAAPSVTLFPPSSEELQANKATLVCLISDFYPGAVTVAWKADSSPVKAGVETTTPSKQSNNKYAASSYLSLTPEQWKSHRSYSCQVTHEGSTVEKTVAPTECS

SEQ ID NO: 677 - protein, 216 aa, Artificial Sequence
  Description of Artificial Sequence: Synthetic polypeptide
QSALTQPASVSGSPGQSITISCTGTSSNIGTYKFVSWYQQHPGKAPKVMIYEVSKRPSGVSNRFSGSKSGNTASLTISGLQAEDEADYYCVSYAGSGTLLFGGGTKLTVLGQPKAAPSVTLFPPSSEELQANKATLVCLISDFYPGAVTVAWKADSSPVKAGVETTTPSKQSNNKYAASSYLSLTPEQWKSHRSYSCQVTHEGSTVEKTVAPTECS

SEQ ID NO: 678 - protein, 110 aa, Artificial Sequence
  Description of Artificial Sequence: Synthetic polypeptide
QSALTQPASVSGSPGQSITISCTGTSSNIGTYKFVSWYQQHPGKAPKVMIYEVSKRPSGVSNRFSGSKSGNTASLTISGLQAEDEADYYCVSYAGSGTLLFGGGTKLTVL

SEQ ID NO: 679 - protein, 451 aa, Artificial Sequence
  Description of Artificial Sequence: Synthetic polypeptide
EVQLLESGGGLVQPGGSLRLSCAASGFTFKSDAMHWVRQAPGKGLEWVSEISGSGGYTNYADSLKSRFTISRDNSKNTLYLQMNSLRAEDTAVYYCARDSYDSSLYVGDYFDYWGQGTLVTVSSASTKGPSVFPLAPCSRSTSESTAALGCLVKDYFPEPVTVSWNSGALTSGVHTFPAVLQSSGLYSLSSVVTVPSSSLGTKTYTCNVDHKPSNTKVDKRVESKYGPPCPPCPAPEAAGGPSVFLFPPKPKDTLMISRTPEVTCVVVDVSQEDPEVQFNWYVDGVEVHNAKTKPREEQFNSTYRVVSVLTVLHQDWLNGKEYKCKVSNKGLPSSIEKTISKAKGQPREPQVYTLPPSQEEMTKNQVSLTCLVKGFYPSDIAVEWESNGQPENNYKTTPPVLDSDGSFFLYSRLTVDKSRWQEGNVFSCSVMHEALHNHYTQKSLSLSLGK

SEQ ID NO: 680 - protein, 214 aa, Artificial Sequence; identical to SEQ ID NO: 631
  Description of Artificial Sequence: Synthetic polypeptide

SEQ ID NO: 681 - protein, 124 aa, Artificial Sequence
  Description of Artificial Sequence: Synthetic polypeptide
EVQLLESGGGLVQPGGSLRLSCAASGFTFKSDAMHWVRQAPGKGLEWVSEISGSGGYTNYADSLKSRFTISRDNSKNTLYLQMNSLRAEDTAVYYCARDSYDSSLYVGDYFDYWGQGTLVTVSS

SEQ ID NO: 682 - protein, 107 aa, Artificial Sequence
  Description of Artificial Sequence: Synthetic polypeptide
EIVLTQSPATLSLSPGERATLSCRASQSVSSYLAWYQQKPGQAPRLLIYDASYRATGIPARFSGSGSGTDFTLTISSLEPEDFAVYYCQQRRNWPLTFGQGTKVEIK

SEQ ID NO: 683 - protein, 17 aa, Artificial Sequence
  Description of Artificial Sequence: Synthetic peptide
EISGSGGYTNYADSLKS

SEQ ID NO: 684 - protein, 7 aa, Artificial Sequence
  Description of Artificial Sequence: Synthetic peptide
DASYRAT

SEQ ID NO: 685 - protein, 7 aa, Artificial Sequence
  Description of Artificial Sequence: Synthetic peptide
DASNRAT

SEQ ID NO: 686 - protein, 9 aa, Artificial Sequence
  Description of Artificial Sequence: Synthetic peptide
QQRRNWPLT

SEQ ID NO: 687 - protein, 120 aa, Artificial Sequence; identical to SEQ ID NO: 651
  Description of Artificial Sequence: Synthetic polypeptide

SEQ ID NO: 688 - protein, 110 aa, Artificial Sequence
  Description of Artificial Sequence: Synthetic polypeptide
QSALTQPASVSGSPGQSITISCTGTSRDIGTYKFVSWYQQHPDKAPKVLLYEVSKRPSGVSSRFSGSKSGNTASLTISGLQAEDQADYHCCSYAGSGTLLFGGGTKLTVL

SEQ ID NO: 689 - protein, 18 aa, Artificial Sequence
  Description of Artificial Sequence: Synthetic peptide
RTYYRSKWLYDYAVTVKS

SEQ ID NO: 690 - protein, 10 aa, Artificial Sequence
  Description of Artificial Sequence: Synthetic peptide
VSYAGSGTLL

SEQ ID NO: 691-710 - skipped (20 entries)

SEQ ID NO: 711 - protein, 326 aa, Homo sapiens
ASTKGPSVFPLAPCSRSTSESTAALGCLVKDYFPEPVTVSWNSGALTSGVHTFPAVLQSSGLYSLSSVVTVPSSNFGTQTYTCNVDHKPSNTKVDKTVERKCCVECPPCPAPPVAGPSVFLFPPKPKDTLMISRTPEVTCVVVDVSHEDPEVQFNWYVDGVEVHNAKTKPREEQFNSTFRVVSVLTVVHQDWLNGKEYKCKVSNKGLPAPIEKTISKTKGQPREPQVYTLPPSREEMTKNQVSLTCLVKGFYPSDISVEWESNGQPENNYKTTPPMLDSDGSFFLYSKLTVDKSRWQQGNVFSCSVMHEALHNHYTQKSLSLSPGK

SEQ ID NO: 712 - DNA, 360 bp, Artificial Sequence
  Description of Artificial Sequence: Synthetic polynucleotide
caggtgcagctgcagcagtctggccctagactcgtgcggccttcccagaccctgtctctgacctgtgccatctccggcgactccgtgttcaacaacaacgccgcctggtcctggatccggcagagcccttctagaggcctggaatggctgggccggacctactaccggtccaagtggctgtacgactacgccgtgtccgtgaagtcccggatcaccgtgaaccctgacacctcccggaaccagttcaccctgcagctgaactccgtgacccctgaggacaccgccctgtactactgcgccagaggctactcctcctccttcgactattggggccagggcaccctcgtgaccgtgtcctct

SEQ ID NO: 713 - DNA, 330 bp, Artificial Sequence
  Description of Artificial Sequence: Synthetic polynucleotide
cagtctgctctgacccagcctgcctccgtgtctggctctcccggccagtccatcaccatcagctgtaccggcacctcctccaacatcggcacctacaagttcgtgtcctggtatcagcagcaccccgacaaggcccccaaagtgctgctgtacgaggtgtccaagcggccctctggcgtgtcctccagattctccggctccaagtctggcaacaccgcctccctgaccatcagcggactgcaggctgaggaccaggccgactaccactgtgtgtcctacgctggctctggcaccctgctgtttggcggaggcaccaagctgaccgtgctg

SEQ ID NO: 714 - DNA, 360 bp, Artificial Sequence
  Description of Artificial Sequence: Synthetic polynucleotide
caggtgcagctgcagcagagcggccccggcctggtcaagcccagccagaccctgagcctgacctgcgccatcagcggcgacagcgtgttcaacaacaacgccgcctggtcctggatccgccagagccccagccgcggcctggagtggctgggccgcacctactaccgcagcaagtggctgtacgactacgccgtgtccgtgaagtcccgcatcaccatcaaccccgacaccagcaagaaccagttctccctgcagctgaacagcgtgacccccgaggacaccgccgtgtactactgcgcccgcggctacagcagcagcttcgactactggggccagggcaccctggtcaccgtgtccagc

SEQ ID NO: 715 - DNA, 330 bp, Artificial Sequence
  Description of Artificial Sequence: Synthetic polynucleotide
cagtctgctctgacccagcctgcctccgtgtctggctctcccggccagtccatcaccatcagctgtaccggcacctcctccaacatcggcacctacaagttcgtgtcctggtatcagcagcaccccggcaaggcccccaaagtgatgatctacgaggtgtccaagcggccctccggcgtgtccaacagattctccggctccaagtccggcaacaccgcctccctgacaatcagcggactgcaggccgaggacgaggccgactactactgtgtgtcctacgccggctctggcaccctgctgtttggcggcggaacaaagctgaccgtgctg

SEQ ID NO: 716 - protein, 4 aa, Unknown
  Description of Unknown: ER retention signal sequence
KDEL

SEQ ID NO: 717 - protein, 101 aa, Homo sapiens
QVQLQQSGPGLVKPSQTLSLTCAISGDSVSSNSAAWNWIRQSPSRGLEWLGRTYYRSKWYNDYAVSVKSRITINPDTSKNQFSLQLNSVTPEDTAVYYCAR

SEQ ID NO: 718 - protein, 99 aa, Homo sapiens
QSALTQPASVSGSPGQSITISCTGTSSDVGSYNLVSWYQQHPGKAPKLMIYEVSKRPSGVSNRFSGSKSGNTASLTISGLQAEDEADYYCCSYAGSSTF

SEQ ID NO: 719 - protein, 750 aa, Homo sapiens
MWNLLHETDSAVATARRPRWLCAGALVLAGGFFLLGFLFGWFIKSSNEATNITPKHNMKAFLDELKAENIKKFLYNFTQIPHLAGTEQNFQLAKQIQSQWKEFGLDSVELAHYDVLLSYPNKTHPNYISIINEDGNEIFNTSLFEPPPPGYENVSDIVPPFSAFSPQGMPEGDLVYVNYARTEDFFKLERDMKINCSGKIVIARYGKVFRGNKVKNAQLAGAKGVILYSDPADYFAPGVKSYPDGWNLPGGGVQRGNILNLNGAGDPLTPGYPANEYAYRRGIAEAVGLPSIPVHPIGYYDAQKLLEKMGGSAPPDSSWRGSLKVPYNVGPGFTGNFSTQKVKMHIHSTNEVTRIYNVIGTLRGAVEPDRYVILGGHRDSWVFGGIDPQSGAAVVHEIVRSFGTLKKEGWRPRRTILFASWDAEEFGLLGSTEWAEENSRLLQERGVAYINADSSIEGNYTLRVDCTPLMYSLVHNLTKELKSPDEGFEGKSLYESWTKKSPSPEFSGMPRISKLGSGNDFEVFFQRLGIASGRARYTKNWETNKFSGYPLYHSVYETYELVEKFYDPMFKYHLTVAQVRGGMVFELANSIVLPFDCRDYAVVLRKYADKIYSISMKHPQEMKTYSVSFDSLFSAVKNFTEIASKFSERLQDFDKSNPIVLRMMNDQLMFLERAFIDPLGLPDRPFYRHVIYAPSSHNKYAGESFPGIYDALFDIESKVDPSKAWGEVKRQIYVAAFTVQAAAETLSEVA

SEQ ID NO: 720 - protein, 752 aa, Mus sp.
MWNALQDRDSAEVLGHRQRWLRVGTLVLALTGTFLIGFLFGWFIKPSNEATGNVSHSGMKKEFLHELKAENIKKFLYNFTRTPHLAGTQNNFELAKQIHDQWKEFGLDLVELSHYDVLLSYPNKTHPNYISIINEDGNEIFKTSLSEQPPPGYENISDVVPPYSAFSPQGTPEGDLVYVNYARTEDFFKLEREMKISCSGKIVIARYGKVFRGNMVKNAQLAGAKGMILYSDPADYFVPAVKSYPDGWNLPGGGVQRGNVLNLNGAGDPLTPGYPANEHAYRHELTNAVGLPSIPVHPIGYDDAQKLLEHMGGPAPPDSSWKGGLKVPYNVGPGFAGNFSTQKVKMHIHSYTKVTRIYNVIGTLKGALEPDRYVILGGHRDAWVFGGIDPQSGAAVVHEIVRSFGTLKKKGRRPRRTILFASWDAEEFGLLGSTEWAEEHSRLLQERGVAYINADSSIEGNYTLRVDCTPLMYSLVYNLTKELQSPDEGFEGKSLYDSWKEKSPSPEFIGMPRISKLGSGNDFEVFFQRLGIASGRARYTKNWKTNKVSSYPLYHSVYETYELVVKFYDPTFKYHLTVAQVRGAMVFELANSIVLPFDCQSYAVALKKYADTIYNISMKHPQEMKAYMISFDSLFSAVNNFTDVASKFNQRLQELDKSNPILLRIMNDQLMYLERAFIDPLGLPGRPFYRHIIYAPSSHNKYAGESFPGIYDALFDISSKVNASKAWNEVKRQISIATFTVQAAAETLREVA

SEQ ID NO: 721 - protein, 750 aa, Macaca fascicularis
MWNLLHETDSAVATARRPRWLCAGALVLAGGFFLLGFLFGWFIKSSSEATNITPKHNMKAFLDELKAENIKKFLHNFTQIPHLAGTEQNFQLAKQIQSQWKEFGLDSVELTHYDVLLSYPNKTHPNYISIINEDGNEIFNTSLFEPPPAGYENVSDIVPPFSAFSPQGMPEGDLVYVNYARTEDFFKLERDMKINCSGKIVIARYGKVFRGNKVKNAQLAGATGVILYSDPDDYFAPGVKSYPDGWNLPGGGVQRGNILNLNGAGDPLTPGYPANEYAYRRGMAEAVGLPSIPVHPIGYYDAQKLLEKMGGSASPDSSWRGSLKVPYNVGPGFTGNFSTQKVKMHIHSTSEVTRIYNVIGTLRGAVEPDRYVILGGHRDSWVFGGIDPQSGAAVVHEIVRSFGMLKKEGWRPRRTILFASWDAEEFGLLGSTEWAEENSRLLQERGVAYINADSSIEGNYTLRVDCTPLMYSLVYNLTKELESPDEGFEGKSLYESWTKKSPSPEFSGMPRISKLGSGNDFEVFFQRLGIASGRARYTKNWETNKFSSYPLYHSVYETYELVEKFYDPMFKYHLTVAQVRGGMVFELANSVVLPFDCRDYAVVLRKYADKIYNISMKHPQEMKTYSVSFDSLFSAVKNFTEIASKFSERLRDFDKSNPILLRMMNDQLMFLERAFIDPLGLPDRPFYRHVIYAPSSHNKYAGESFPGIYDALFDIESKVDPSQAWGEVKRQISIATFTVQAAAETLSEVA

SEQ ID NO: 722 - protein, 76 aa, Artificial Sequence
  Description of Artificial Sequence: Synthetic polypeptide
EVQLLESGGGLVQPGGSLRLSCAASGFTFKSDAMHWVRQAPGKGLEWVSEISGSGGYTNYADSVKGRFTISRDNSK

SEQ ID NO: 723 - protein, 76 aa, Artificial Sequence
  Description of Artificial Sequence: Synthetic polypeptide
NTLYLQMNSLRAEDTAVYYCARDSYDSSLYVGDYFDYWGQGTLVTVSSASTKGPSVFPLAPSSKSTSGGTAALGCL

SEQ ID NO: 724 - protein, 75 aa, Artificial Sequence
  Description of Artificial Sequence: Synthetic polypeptide
VKDYFPEPVTVSWNSGALTSGVHTFPAVLQSSGLYSLSSVVTVPSSSLGTQTYICNVNHKPSNTKVDKKVEPKSC

SEQ ID NO: 725 - protein, 72 aa, Artificial Sequence
  Description of Artificial Sequence: Synthetic polypeptide
EIVLTQSPATLSLSPGERATLSCRASQSVSSYLAWYQQKPGQAPRLLIYDASNRATGIPARFSGSGSGTDFT

SEQ ID NO: 726 - protein, 72 aa, Artificial Sequence
  Description of Artificial Sequence: Synthetic polypeptide
LTISSLEPEDFAVYYCQQRSNWPLTFGQGTKVEIKRTVAAPSVFIFPPSDEQLKSGTASVVCLLNNFYPREA

SEQ ID NO: 727 - protein, 70 aa, Artificial Sequence
  Description of Artificial Sequence: Synthetic polypeptide
KVQWKVDNALQSGNSQESVTEQDSKDSTYSLSSTLTLSKADYEKHKVYACEVTHQGLSSPVTKSFNRGEC

SEQ ID NO: 728 - protein, 450 aa, artificial
  antibody
QVQLQQSGPGLVKPSQTLSLTCAISGDSVFNNNAAWSWIRQSPSRGLEWLGRTYYRSKWLYDYAVSVKSRITINPDTSKNQFSLQLNSVTPEDTAVYYCARGYSSSFDYWGQGTLVTVSSASTKGPSVFPLAPSSKSTSGGTAALGCLVKDYFPEPVTVSWNSGALTSGVHTFPAVLQSSGLYSLSSVVTVPSSSLGTQTYICNVNHKPSNTKVDKKVEPKSCDKTHTCPPCPAPEAAGASSVFLFPPKPKDTLMISRTPEVTCVVVDVSAEDPEVKFNWYVDGVEVHNAKTKPREEQYNSTYRVVSVLTVLHQDWLNGKEYKCKVSNKALPSSIEKTISKAKGQPREPQVYTLPPSREEMTKNQVSLTCLVKGFYPSDIAVEWESNGQPENNYKTTPPVLDSDGSFLLYSKLTVDKSRWQQGNVFSCSVMHEALHNHYTQKSLSLSPGK

SEQ ID NO: 729 - protein, 450 aa, Artificial Sequence
  antibody fragment
QVQLQQSGPRLVRPSQTLSLTCAISGDSVFNNNAAWSWIRQSPSRGLEWLGRTYYRSKWLYDYAVSVKSRITVNPDTSRNQFTLQLNSVTPEDTALYYCARGYSSSFDYWGQGTLVTVSSASTKGPSVFPLAPSSKSTSGGTAALGCLVKDYFPEPVTVSWNSGALTSGVHTFPAVLQSSGLYSLSSVVTVPSSSLGTQTYICNVNHKPSNTKVDKKVEPKSCDKTHTCPPCPAPEAAGASSVFLFPPKPKDTLMISRTPEVTCVVVDVSAEDPEVKFNWYVDGVEVHNAKTKPREEQYNSTYRVVSVLTVLHQDWLNGKEYKCKVSNKALPSSIEKTISKAKGQPREPQVYTLPPSREEMTKNQVSLTCLVKGFYPSDIAVEWESNGQPENNYKTTPPVLDSDGSFLLYSKLTVDKSRWQQGNVFSCSVMHEALHNHYTQKSLSLSPGK
